(19) United States
(12) Patent Application Publication
(10) Pub. No.: US 2025/0195555 A1
(43) Pub. Date: Jun. 19, 2025

(54) TREATMENT OF HGFAC RELATED DISEASES AND DISORDERS

(71) Applicant: Empirico Inc., San Diego, CA (US)

(72) Inventors: Omri GOTTESMAN, San Diego, CA (US); Andrew ALLEN, San Diego, CA (US); Shannon BRUSE, San Diego, CA (US); Brian CAJES, San Diego, CA (US); David JAKUBOSKY, San Diego, CA (US); David LEWIS, Madison, WI (US); Gregory MCINNES, San Diego, CA (US); Jason O'ROURKE, San Diego, CA (US); David ROZEMA, Cross Plains, WI (US); Paul BUSKE, Middleton, CA (US)

(21) Appl. No.: 18/845,818

(22) PCT Filed: Mar. 16, 2023
(86) PCT No.: PCT/US2023/064565

§ 371 Date: Sep. 10, 2024

Related U.S. Application Data
(60) Provisional application No. 63/320,433, filed on Mar. 16, 2022.
(60) Provisional application No. 63/429,436, filed on Dec. 1, 2022.
(60) Provisional application No. 63/433,364, filed on Dec. 16, 2022.

(51) Int. Cl. A61K 31/712; A61P 35/00; C12N 15/10

(52) U.S. Cl. CPC A61K 31/712; A61P 35/00; C12N 15/102

(57) ABSTRACT

Disclosed herein are compositions comprising an oligonucleotide that targets HGFAC. The oligonucleotide may include a small interfering RNA (siRNA) or an antisense oligonucleotide (ASO). Also provided herein are methods of treating cancer that include providing an oligonucleotide that targets HGFAC in a subject.

### CROSS-REFERENCE

[0001] This application claims the benefit of U.S. Provisional Application No. 63/320,433, filed Mar. 16, 2022; U.S. Provisional Application No. 63/429,436, filed Dec. 1, 2022; and U.S. Provisional Application No. 63/433,364, filed Dec. 16, 2022, which applications are incorporated herein by reference.

### INCORPORATION BY REFERENCE OF SEQUENCE LISTING

[0002] The present application is being filed along with a Sequence Listing in electronic format. The Sequence Listing is provided as a file entitled 54462-738601.XML, created Mar. 16, 2023, which is 7,609,601 bytes in size. The information in the electronic format of the Sequence Listing is incorporated by reference in its entirety.

### BACKGROUND

[0003] Cancer is a serious threat, and improved therapeutics are needed.

### SUMMARY

[0004] Disclosed herein, in some embodiments, are compositions such as a composition comprising an oligonucleotide. The oligonucleotide may target HGFAC. Disclosed herein, in some embodiments, are compositions comprising an oligonucleotide that targets HGFAC and when administered to a subject having cancer in an effective amount improves a clinical response related to the cancer. In some embodiments, the improved clinical response comprises at least a 10% increase in a clinical response measurement relative to a baseline clinical response measurement obtained from the subject prior to administration of the composition. In some embodiments, the clinical response comprises progression free survival, duration of response, disease control rate, health-related quality of life, milestone survival, clinical benefit rate, pathological complete response, complete response, objective response rate, duration of clinical benefit, time to next treatment, time to treatment failure, disease-free survival, or time to cancer progression. Disclosed herein, in some embodiments, are compositions comprising an oligonucleotide that targets HGFAC and when administered to a subject in an effective amount alters an immune cell measurement in a subject. In some embodiments, the immune cell measurement is altered by about 10% or more, as compared to prior to administration. In some embodiments, the immune cell measurement comprises a myeloid derived suppressor cell or subpopulation count, CD8+ tumor infiltrating lymphocyte count, leukocyte count, T lymphocyte count, activated T lymphocyte count, B lymphocyte count, activated B lymphocyte count, monocyte count, macrophage count, activated macrophage count, dendritic cell count, neutrophil count, eosinophil count, basophil count, or mast cell count. Disclosed herein, in some embodiments, are compositions comprising an oligonucleotide that targets HGFAC and when administered to a subject in an effective amount increases an antibody level in a subject. In some embodiments, the antibody level is increased by about 10% or more, as compared to prior to administration. In some embodiments, the antibody level comprises an IgA level, IgG level, or IgM level. Disclosed herein, in some embodiments, are compositions comprising an oligonucleotide that targets HGFAC and when administered to a subject in an effective amount decreases a tumor marker level in a subject. In some embodiments, the tumor marker level is decreased by about 10% or more, as compared to prior to administration. In some embodiments, the tumor marker comprises CEA, PSA, CA 125, CA 15-3, CA 19-9, CA 27.29, CA 72-4, AFP, hCG, B2M, BTA, Calcitonin, CgA, CELLSEARCH, DCP, Gastrin, HE4, LDH, NSE, NMP22, or PAP. In some embodiments, the oligonucleotide comprises a modified internucleoside linkage. In some embodiments, the modified internucleoside linkage comprises alkylphosphonate, phosphorothioate, methylphosphonate, phosphorodithioate, alkylphosphonothioate, phosphoramidate, carbamate, carbonate, phosphate triester, acetamidate, or carboxymethyl ester, or a combination thereof. In some embodiments, the modified internucleoside linkage comprises one or more phosphorothioate linkages. In some embodiments, the oligonucleotide comprises 1, 2, 3, 4, 5, 6, 7, 8, 9, 10, 11, 12, 13, 14, 15, 16, 17, 18, 19, or 20 modified internucleoside linkages. In some embodiments, the oligonucleotide comprises a modified nucleoside. In some embodiments, the modified nucleoside comprises a locked nucleic acid (LNA), hexitol nucleic acid (HLA), cyclohexene nucleic acid (CeNA), 2′-methoxyethyl, 2′-O-alkyl, 2′-O-allyl, 2′-O-allyl, 2′-fluoro, or 2′-deoxy, or a combination thereof. In some embodiments, the modified nucleoside comprises a LNA. In some embodiments, the modified nucleoside comprises a 2′,4′ constrained ethyl nucleic acid. In some embodiments, the modified nucleoside comprises a 2′-O-methyl nucleoside, 2′-deoxyfluoro nucleoside, 2′-O—N-methylacetamido (2′-O-NMA) nucleoside, a 2′-O-dimethylaminoethoxyethyl (2′-O-DMAEOE) nucleoside, 2′-O-aminopropyl (2′-O-AP) nucleoside, or 2′-ara-F, or a combination thereof. In some embodiments, the modified nucleoside comprises one or more 2′fluoro modified nucleosides. In some embodiments, the modified nucleoside comprises a 2′ O-alkyl modified nucleoside. In some embodiments, the oligonucleotide comprises 1, 2, 3, 4, 5, 6, 7, 8, 9, 10, 11, 12, 13, 14, 15, 16, 17, 18, 19, 20, or 21 modified nucleosides. In some embodiments, the oligonucleotide comprises a lipid attached at a 3′ or 5′ terminus of the oligonucleotide. In some embodiments, the lipid comprises cholesterol, myristoyl, palmitoyl, stearoyl, lithocholoyl, docosanoyl, docosahexaenoyl, myristyl, palmityl stearyl, or α-tocopherol, or a combination thereof. In some embodiments, the oligonucleotide comprises a sugar moiety attached at a 3′ or 5′ terminus of the oligonucleotide. In some embodiments, the sugar comprises N-acetylgalactosamine (GalNAc), N-acetylglucosamine (GlcNAc), or mannose. In some embodiments, the sugar moiety comprises a GalNAc moiety such as ETL17. In some embodiments, the oligonucleotide comprises a small interfering RNA (siRNA) comprising a sense strand and an antisense strand. In some embodiments, the sense strand is 12-30 nucleosides in length. In some embodiments, the antisense strand is 12-30 nucleosides in length. Disclosed herein, in some embodiments, are compositions comprising an oligonucleotide that inhibits the expression of HGFAC, wherein the oligonucleotide comprises an siRNA comprising a sense strand and an antisense strand, each strand is independently about 12-30 nucleosides in length, and at least one of the sense strand and the antisense strand comprises a nucleoside sequence comprising about 12-30 contiguous nucleosides of SEQ ID NO: 4803. In some embodiments, any one of the following is true with regard to the sense strand: (i) all purines comprise 2′ fluoro modified purines, and all pyrimidines comprise a mixture of 2′ fluoro and 2′-O-methyl modified pyrimidines; (ii) all purines comprise 2′-O-methyl modified purines, and all pyrimidines comprise a mixture of 2′ fluoro and 2′-O-methyl modified pyrimidines; (iii) all purines comprise 2′ fluoro modified purines, and all pyrimidines comprise 2′-O-methyl modified pyrimidines; (iv) all pyrimidines comprise 2′ fluoro modified pyrimidines, and all purines comprise a mixture of 2′ fluoro and 2′-O-methyl modified purines; (v) all pyrimidines comprise 2′-O-methyl modified pyrimidines, and all purines comprise a mixture of 2′ fluoro and 2′-O-methyl modified purines; or (vi) all pyrimidines comprise 2′ fluoro modified pyrimidines, and all purines comprise 2′-O-methyl modified purines. In some embodiments, the sense strand comprises any one of modification patterns 1S, 2S, 3S, 4S, 5S, 6S, 7S, 8S, or 9S, 10S, 11S, 12S, 13S, 14S, 15S, 16S, 17S, 18S, 19S, 20S, 21S, 22S, 23S, 24S, 25S, 26S, 27S, 28S, 29S, 30S, 31S, 32S, 33S, 34S, 35S, 36S, 37S, 38S, 39S, 40S, 41S, 42S, 43S, 44S, 45S, 46S, 47S, 48S, 49S, 50S, 51S, 52S, 53S, 54S, 55S, 56S, 57S, 58S, 59S, 60S, 61S, 62S, 63S, 64S, 65S, 66S, 67S, 68S, 69S, 70S, 71S, 72S, or 73S. In some embodiments, any one of the following is true with regard to the antisense strand: (i) all purines comprise 2′ fluoro modified purines, and all pyrimidines comprise a mixture of 2′ fluoro and 2′-O-methyl modified pyrimidines; (ii) all purines comprise 2′-O-methyl modified purines, and all pyrimidines comprise a mixture of 2′ fluoro and 2′-O-methyl modified pyrimidines; (iii) all purines comprise 2′-O-methyl modified purines, and all pyrimidines comprise 2′ fluoro modified pyrimidines; (iv) all pyrimidines comprise 2′ fluoro modified pyrimidines, and all purines comprise a mixture of 2′ fluoro and 2′-O-methyl modified purines; (v) all pyrimidines comprise 2′-O-methyl modified pyrimidines, and all purines comprise a mixture of 2′ fluoro and 2′-O-methyl modified purines; or (vi) all pyrimidines comprise 2′-O-methyl modified pyrimidines, and all purines comprise 2′ fluoro modified purines. In some embodiments, the antisense strand comprises any one of modification patterns 1AS, 2AS, 3AS, 4AS, 5AS, 6AS, 7AS, 8AS, 9AS, 10AS, 11 AS, 12AS, 13AS, 14AS, 15AS, or 16AS. In some embodiments, the sense strand comprises the nucleic acid sequence of any one of SEQ ID NOs: 1-2051, 4562-4616, or 4757-4779, and the antisense strand comprises the nucleic acid sequence of any one of SEQ ID NOs: 2052-4102, 4617-4671, or 4780-4782. In some embodiments, the oligonucleotide comprises an antisense oligonucleotide (ASO). In some embodiments, the ASO is 12-30 nucleosides in length. Disclosed herein, in some embodiments, are compositions comprising an oligonucleotide that inhibits the expression of HGFAC, wherein the oligonucleotide comprises an ASO about 12-30 nucleosides in length and a nucleoside sequence complementary to about 12-30 contiguous nucleosides of SEQ ID NO: 4803. In some embodiments, the composition comprises a pharmaceutically acceptable carrier. Disclosed herein, in some embodiments, are methods of treatment. The method may include treatment of cancer in a subject in need.

[0005] The method may include administering a composition such as a composition comprising an oligonucleotide that targets HGFAC. Disclosed herein, in some embodiments, are methods of treating a subject having cancer, comprising administering an effective amount of the composition to the subject.

[0006] Some embodiments include administering a checkpoint inhibitor to the subject. Some embodiments include administering radiotherapy to the subject. In some embodiments, the cancer comprises a malignant neoplasm, a solid tumor, or a hematological cancer. In some embodiments, the cancer comprises a malignant neoplasm of a urinary tract, malignant neoplasm of an endocrine gland, malignant neoplasm of a soft tissue, malignant neoplasm of skin, malignant neoplasm of a skeletal system, malignant neoplasm of a respiratory organ, malignant neoplasm of an intrathoracic organ, malignant neoplasm of a genital organ, malignant neoplasm of a lip, malignant neoplasm of an oral cavity, malignant neoplasm of a pharynx, malignant neoplasm of an eye, malignant neoplasm of a central nervous system, malignant neoplasm of a brain, malignant neoplasm of a digestive system, malignant neoplasm of a breast, malignant neoplasm of a pancreas, or a malignant melanoma.

### BRIEF DESCRIPTION OF THE DRAWINGS

[0007] FIG. 1A depicts expression of HGFAC mRNA in transfected RPE cells.

[0008] FIG. 1B depicts expression of intracellular HGFAC protein expression from whole cell lysates by western blot.

[0009] FIG. 1C quantifies the fold change of HGFAC expression in difference cell variants.

[0010] FIG. 1D depicts the levels of secreted HGFAC in cells transfected with wildtype or each variant.

### DETAILED DESCRIPTION OF THE INVENTION

[0011] Large-scale human genetic data can improve the success rate of pharmaceutical discovery and development. A Genome Wide Association Study (GWAS) detects associations between genetic variants and traits in a population sample, and this improves understanding of the biology of disease and provides evidence of applicable treatments. A GWAS generally utilizes genotyping and/or sequencing data, and often involves an evaluation of millions of genetic variants that are relatively evenly distributed across the genome. The most common GWAS design is the case-control study, which involves comparing variant frequencies in cases versus controls. If a variant has a significantly different frequency in cases versus controls, that variant is considered associated with disease. Association statistics used in a GWAS include p-values, as a measure of statistical significance; odds ratios (OR), as a measure of effect size; or beta coefficients (beta), as a measure of effect size. Researchers often assume an additive genetic model and calculate an allelic odds ratio, which is the increased (or decreased) risk of disease conferred by each additional copy of an allele (compared to carrying no copies of that allele). An additional concept in design and interpretation of GWAS is that of linkage disequilibrium, which is the non-random association of alleles. The presence of linkage disequilibrium can obfuscate which variant is “causal.”

[0012] Functional annotation of variants and/or wet lab experimentation is used to identify a causal genetic variant identified via GWAS, and in many cases leads to identification of disease-causing genes. In particular, understanding the functional effect of a causal genetic variant (for example, loss of protein function, gain of protein function, increase in gene expression, or decrease in gene expression) allows that variant to be used as a proxy for therapeutic modulation of the target gene, or to gain insight into potential therapeutic efficacy and safety of a therapeutic that modulates that target.

[0013] Identification of such gene-disease associations has provided insights into disease biology and is used to identify novel therapeutic targets for the pharmaceutical industry. In order to translate the therapeutic insights derived from human genetics, disease biology in patients is exogenously ‘programmed’ into replicating the observation from human genetics. There are several options for therapeutic modalities that may be brought to bear in translating therapeutic targets identified via human genetics into novel medicines. These include well established therapeutic modalities such as small molecules and monoclonal antibodies, maturing modalities such as oligonucleotides, and emerging modalities such as gene therapy and gene editing. The choice of therapeutic modality depends on factors such as the location of a target (for example, intracellular, extracellular, or secreted), a relevant tissue (for example, liver) and a relevant indication.

[0014] The HGFAC gene is located on chromosome 4, and encodes hepatocyte growth factor activator (HGFAC). HGFAC may include 655 amino acids or have a mass of about 70.7 kDa. HGFAC may be expressed in liver cells. HGFAC can act as a serine protease that converts hepatocyte growth factor to active form. HGFAC may be secreted, for example, into the bloodstream. HGFAC may be part of the peptidase S1 protein family. An example of an HGFAC amino acid sequence, and further description of HGFAC is included at uniprot.org under accession no. Q04756 (last modified Feb. 23, 2022).

[0015] Here it is shown that deleterious gene variants of HGFAC result in protection from malignant neoplasms. Therefore, inhibition of HGFAC may serve as a therapeutic for treatment of a variety of cancers. Disclosed herein are compositions comprising an oligonucleotide that targets HGFAC. Where inhibition or targeting of HGFAC is disclosed, it is contemplated that some embodiments may include inhibiting or targeting a HGFAC protein or HGFAC RNA. For example, by inhibiting or targeting an RNA (e.g., mRNA) encoded by the HGFAC gene using an oligonucleotide described herein, the HGFACE protein may be inhibited or targeted as a result of there being less production of the HGFAC protein by translation of the HGFAC RNA; or a HGFAC protein may be targeted or inhibited by an oligonucleotide that binds or interacts with a HGFAC RNA and reduces production of the HGFAC protein from the HGFAC RNA. Thus, targeting HGFAC may refer to binding a HGFAC RNA and reducing HGFAC RNA or protein levels. The oligonucleotide may include a small interfering RNA (siRNA) or an antisense oligonucleotide (ASO). Also provided herein are methods of treating cancer by providing an oligonucleotide that targets HGFAC to a subject in need thereof.

### I. Compositions

[0016] Disclosed herein, in some embodiments, are compositions comprising a therapeutic modality that targets or inhibits HGFAC. Non-limiting examples are listed in Table 1B. In some embodiments, a therapeutic modality, composition, or compound described herein may refer to any one of: a dsRNA agent (e.g., siRNA), antisense oligonucleotide, and a small molecule compound. In some embodiments, the composition comprises a therapeutic modality that targets HGFAC. In some embodiments, the composition consists of therapeutic modality that targets HGFAC. In some embodiments, the composition comprises an antibody or a binding fragment thereof. In some embodiments, the therapeutic modality reduces HGFAC mRNA expression in the subject. In some embodiments, the therapeutic modality reduces HGFAC protein expression in the subject. In some embodiments, a composition described herein is used in a method of treating a disorder in a subject in need thereof. Some embodiments relate to a composition for use in a method of treating a disorder such as cancer. Some embodiments relate to use of a composition, in a method of treating a disorder such as cancer.

TABLE 1A
Therapeutic modalities

| Type of Therapy | Description or Examples | Possible Target | Possible Mode of Action |
|---|---|---|---|
| Antisense Oligonucleotide (ASO) | Single-stranded DNA or RNA | mRNA | Prevents translation or splicing |
| Small Interfering RNA (siRNA) | Double-stranded RNA | mRNA | Induces innate gene-silencing causing target degradation |
| Anti-Micro RNA | Single-stranded RNA | microRNA | Inactivates microRNA, affecting expression |
| Micro-RNA Mimic | Double-stranded RNA | mRNA | Prevents translation |
| mRNA Analog | Single-stranded RNA | Ribosomes | Induces translation of novel protein |
| Aptamer | Single-stranded DNA or RNA | Many | Inactivates or modifies target |
| CRISPR | gRNA and Cas9 enzyme | DNA | Inactivates gene or alters DNA sequence |
| Small Molecule Inhibitor | Low molecular weight organic | Protein | Inhibits a specific function of a protein or disrupts |
| | compound | | protein-protein interactions |
| Antibody | Polyclonal antibody, monoclonal | Protein | Inhibits a specific function of a protein or disrupts |
| | antibody, nanobody, antibody | | protein-protein interactions |
| | binding fragment | | |

[0017] Because HGFAC is a protease, some small molecule inhibitors may be useful for inhibiting its protease activity. Some protease inhibitors may have sub-optimal IC50 values for HGFAC relative to other protein targets, or may be non-specific for HGFAC, though, so other therapeutic modalities such as antibodies or oligonucleotide therapeutics may be more useful. Nafamostat may inhibit HGFAC with an IC50 of about 150 nM for HGFAC. Nafamostat may inhibit other serine proteases with a much lower IC50 than HGFAC. In some embodiments, the small molecule is a protease inhibitor such as a serine protease inhibitor. An example of a serine serine protease inhibitor may include Nafamostat.

[0018] Disclosed herein, in some embodiments, are compositions comprising an oligonucleotide. In some embodiments, the composition comprises an oligonucleotide that targets HGFAC. In some embodiments, the composition consists of an oligonucleotide that targets HGFAC. In some embodiments, the oligonucleotide reduces HGFAC mRNA expression in the subject. In some embodiments, the oligonucleotide reduces HGFAC protein expression in the subject. The oligonucleotide may include a small interfering RNA (siRNA) described herein. The oligonucleotide may include an antisense oligonucleotide (ASO) described herein. In some embodiments, a composition described herein is used in a method of treating a disorder in a subject in need thereof. Some embodiments relate to a composition comprising an oligonucleotide for use in a method of treating a disorder such as cancer. Some embodiments relate to use of a composition comprising an oligonucleotide, in a method of treating a disorder such as cancer.

[0019] Some embodiments include a composition comprising an oligonucleotide that targets HGFAC and when administered to a subject in an effective amount decreases HGFAC mRNA or protein levels in a cell, fluid, or tissue. In some embodiments, the composition comprises an oligonucleotide that targets HGFAC and when administered to a subject in an effective amount decreases HGFAC mRNA levels in a cell or tissue. In some embodiments, the cell is a liver cell or hepatocyte. In some embodiments, the tissue is liver tissue. In some embodiments, the HGFAC mRNA levels are decreased by about 2.5% or more, about 5% or more, or about 7.5% or more, as compared to prior to administration. In some embodiments, the HGFAC mRNA levels are decreased by about 10% or more, as compared to prior to administration. In some embodiments, the HGFAC mRNA levels are decreased by about 20% or more, about 30% or more, about 40% or more, about 50% or more, about 60% or more, about 70% or more, about 80% or more, about 90% or more, or about 100%, as compared to prior to administration. In some embodiments, the HGFAC mRNA levels are decreased by no more than about 2.5%, no more than about 5%, or no more than about 7.5%, as compared to prior to administration. In some embodiments, the HGFAC mRNA levels are decreased by no more than about 10%, as compared to prior to administration. In some embodiments, the HGFAC mRNA levels are decreased by no more than about 20%, no more than about 30%, no more than about 40%, no more than about 50%, no more than about 60%, no more than about 70%, no more than about 80%, or no more than about 90%, as compared to prior to administration. In some embodiments, the HGFAC mRNA levels are decreased by 2.5%, 5%, 7.5%, 10%, 15%, 20%, 25%, 30%, 35%, 40%, 45%, 50%, 55%, 60%, 65%, 70%, 75%, 80%, 85%, 90%, 95%, or 100%, or by a range defined by any of the two aforementioned percentages.

[0020] In some embodiments, the composition comprises an oligonucleotide that targets HGFAC and when administered to a subject in an effective amount decreases HGFAC protein levels in a cell, fluid, or tissue. In some embodiments, the cell is a liver cell or hepatocyte. In some embodiments, the fluid is a serum, blood, or plasma. In some embodiments, the tissue is liver tissue. In some embodiments, the HGFAC protein levels are decreased by about 2.5% or more, about 5% or more, or about 7.5% or more, as compared to prior to administration. In some embodiments, the HGFAC protein levels are decreased by about 10% or more, as compared to prior to administration. In some embodiments, the HGFAC protein levels are decreased by about 20% or more, about 30% or more, about 40% or more, about 50% or more, about 60% or more, about 70% or more, about 80% or more, about 90% or more, or about 100%, as compared to prior to administration. In some embodiments, the HGFAC protein levels are decreased by no more than about 2.5%, no more than about 5%, or no more than about 7.5%, as compared to prior to administration. In some embodiments, the HGFAC protein levels are decreased by no more than about 10%, as compared to prior to administration. In some embodiments, the HGFAC protein levels are decreased by no more than about 20%, no more than about 30%, no more than about 40%, no more than about 50%, no more than about 60%, no more than about 70%, no more than about 80%, or no more than about 90%, as compared to prior to administration. In some embodiments, the HGFAC protein levels are decreased by 2.5%, 5%, 7.5%, 10%, 15%, 20%, 25%, 30%, 35%, 40%, 45%, 50%, 55%, 60%, 65%, 70%, 75%, 80%, 85%, 90%, 95%, or 100%, or by a range defined by any of the two aforementioned percentages.

[0021] In some embodiments, the composition comprises an oligonucleotide that targets HGFAC and when administered to a subject in an effective amount diminishes a cancer phenotype. The cancer may include: malignant neoplasms, solid tumors, hematological cancers, malignant neoplasms of urinary tract, malignant neoplasms of thyroid and other endocrine glands, malignant neoplasms of soft tissue, malignant neoplasms of skin, malignant neoplasms of skeletal system, malignant neoplasms of respiratory and intrathoracic organs, malignant neoplasms of male genital organs, malignant neoplasms of female genital organs, malignant neoplasms of lip, oral cavity and pharynx, malignant neoplasms of eye, brain and other parts of central nervous system, malignant neoplasms of digestive system, malignant neoplasms of breast, malignant neoplasms of pancreas, or malignant melanoma. In some embodiments, the cancer phenotype is decreased by about 2.5% or more, about 5% or more, or about 7.5% or more, as compared to prior to administration. In some embodiments, the cancer phenotype is decreased by about 10% or more, as compared to prior to administration. In some embodiments, the cancer phenotype is decreased by about 20% or more, about 30% or more, about 40% or more, about 50% or more, about 60% or more, about 70% or more, about 80% or more, about 90% or more, or about 100%, as compared to prior to administration. In some embodiments, the cancer phenotype is decreased by no more than about 2.5%, no more than about 5%, or no more than about 7.5%, as compared to prior to administration. In some embodiments, the cancer phenotype is decreased by no more than about 10%, as compared to prior to administration. In some embodiments, the cancer phenotype is decreased by no more than about 20%, no more than about 30%, no more than about 40%, no more than about 50%, no more than about 60%, no more than about 70%, no more than about 80%, or no more than about 90%, as compared to prior to administration. In some embodiments, the cancer phenotype is decreased by 2.5%, 5%, 7.5%, 10%, 15%, 20%, 25%, 30%, 35%, 40%, 45%, 50%, 55%, 60%, 65%, 70%, 75%, 80%, 85%, 90%, 95%, or 100%, or by a range defined by any of the two aforementioned percentages.

[0022] In some embodiments, the composition comprises an oligonucleotide that targets HGFAC and when administered to a subject in an effective amount enhances a protective phenotype against a cancer in the subject. An example of a protective phenotype may include an anti-cancer immune response. The cancer may include: malignant neoplasms, solid tumors, hematological cancers, malignant neoplasms of urinary tract, malignant neoplasms of thyroid and other endocrine glands, malignant neoplasms of soft tissue, malignant neoplasms of skin, malignant neoplasms of skeletal system, malignant neoplasms of respiratory and intrathoracic organs, malignant neoplasms of male genital organs, malignant neoplasms of female genital organs, malignant neoplasms of lip, oral cavity and pharynx, malignant neoplasms of eye, brain and other parts of central nervous system, malignant neoplasms of digestive system, malignant neoplasms of breast, malignant neoplasms of pancreas, or malignant melanoma. In some embodiments, the protective phenotype is increased by about 2.5% or more, about 5% or more, or about 7.5% or more, as compared to prior to administration. In some embodiments, the protective phenotype is increased by about 10% or more, as compared to prior to administration. In some embodiments, the protective phenotype is increased by about 20% or more, about 30% or more, about 40% or more, about 50% or more, about 60% or more, about 70% or more, about 80% or more, about 90% or more, or about 100% or more, as compared to prior to administration. In some embodiments, the protective phenotype is increased by about 200% or more, about 300% or more, about 400% or more, about 500% or more, about 600% or more, about 700% or more, about 800% or more, about 900% or more, or about 1000% or more, as compared to prior to administration. In some embodiments, the protective phenotype is increased by no more than about 2.5%, no more than about 5%, or no more than about 7.5%, as compared to prior to administration. In some embodiments, the protective phenotype is increased by no more than about 10%, as compared to prior to administration. In some embodiments, the protective phenotype is increased by no more than about 20%, no more than about 30%, no more than about 40%, no more than about 50%, no more than about 60%, no more than about 70%, no more than about 80%, no more than about 90%, or no more than about 100%, as compared to prior to administration. In some embodiments, the protective phenotype is increased by no more than about 200%, no more than about 300%, no more than about 400%, no more than about 500%, no more than about 600%, no more than about 700%, no more than about 800%, no more than about 900%, or no more than about 1000%, as compared to prior to administration. In some embodiments, the protective phenotype is increased by 2.5%, 5%, 7.5%, 10%, 15%, 20%, 25%, 30%, 35%, 40%, 45%, 50%, 55%, 60%, 65%, 70%, 75%, 80%, 85%, 90%, 95%, 100%, 150%, 200%, 250%, 300%, 400%, 500%, 600%, 700%, 800%, 900%, or 1000%, or by a range defined by any of the two aforementioned percentages.

[0023] In some embodiments, the composition comprises an oligonucleotide that targets HGFAC and when administered to a subject in an effective amount increases or improves a clinical response in the subject. The clinical response may include: immune specific related response criteria (irRC) such as set forth in iRECIST, progression free survival (PFS), duration of response (DOR), disease control rate (DCR), health-related quality of life, milestone survival, clinical benefit rate, pathological complete response, complete response, objective response rate, duration of clinical benefit, time to next treatment, time to treatment failure, disease-free survival, or time to progression. In some embodiments, the clinical response is increased by about 2.5% or more, about 5% or more, or about 7.5% or more, as compared to prior to administration. In some embodiments, the clinical response is increased by about 10% or more, as compared to prior to administration. In some embodiments, the clinical response is increased by about 20% or more, about 30% or more, about 40% or more, about 50% or more, about 60% or more, about 70% or more, about 80% or more, about 90% or more, or about 100% or more, as compared to prior to administration. In some embodiments, the clinical response is increased by about 200% or more, about 300% or more, about 400% or more, about 500% or more, about 600% or more, about 700% or more, about 800% or more, about 900% or more, or about 1000% or more, as compared to prior to administration. In some embodiments, the clinical response is increased by no more than about 2.5%, no more than about 5%, or no more than about 7.5%, as compared to prior to administration. In some embodiments, the clinical response is increased by no more than about 10%, as compared to prior to administration. In some embodiments, the clinical response is increased by no more than about 20%, no more than about 30%, no more than about 40%, no more than about 50%, no more than about 60%, no more than about 70%, no more than about 80%, no more than about 90%, or no more than about 100%, as compared to prior to administration. In some embodiments, the clinical response is increased by no more than about 200%, no more than about 300%, no more than about 400%, no more than about 500%, no more than about 600%, no more than about 700%, no more than about 800%, no more than about 900%, or no more than about 1000%, as compared to prior to administration. In some embodiments, the clinical response is increased by 2.5%, 5%, 7.5%, 10%, 15%, 20%, 25%, 30%, 35%, 40%, 45%, 50%, 55%, 60%, 65%, 70%, 75%, 80%, 85%, 90%, 95%, 100%, 150%, 200%, 250%, 300%, 400%, 500%, 600%, 700%, 800%, 900%, or 1000%, or by a range defined by any of the two aforementioned percentages.

[0024] In some embodiments, the composition comprises an oligonucleotide that targets HGFAC and when administered to a subject in an effective amount improves a cell count measurement in the subject. The cell count measurement may be an immune cell count measurement. The cell count measurement may be indicative of an anti-cancer immune response. The cell count measurement may include a cancer cell count measurement. The improvement may comprise a change. In some embodiments, the change is an increase. in some embodiments, the change is a decrease (e.g. a cancer cell count). The cell count measurement may include: myeloid derived suppressor cell (MDSC) counts and subpopulations, CD8+ tumor infiltrating lymphocytes (TILs), leukocyte counts, T lymphocyte counts, T lymphocyte activation states, B lymphocyte counts, B lymphocyte activation states, monocyte counts, macrophage counts, macrophage activation states, dendritic cell counts, neutrophil counts, eosinophil counts, basophil counts, or mast cell counts. In some embodiments, cell count measurement is improved by about 2.5% or more, about 5% or more, or about 7.5% or more, as compared to prior to administration. In some embodiments, the cell count measurement is improved by about 10% or more, as compared to prior to administration. In some embodiments, the cell count measurement is improved by about 20% or more, about 30% or more, about 40% or more, about 50% or more, about 60% or more, about 70% or more, about 80% or more, about 90% or more, or about 100%, as compared to prior to administration. In some embodiments, the cell count measurement is improved by no more than about 2.5%, no more than about 5%, or no more than about 7.5%, as compared to prior to administration. In some embodiments, the cell count measurement is improved by no more than about 10%, as compared to prior to administration. In some embodiments, the cell count measurement is improved by no more than about 20%, no more than about 30%, no more than about 40%, no more than about 50%, no more than about 60%, no more than about 70%, no more than about 80%, or no more than about 90%, as compared to prior to administration. In some embodiments, the cell count measurement is improved by 2.5%, 5%, 7.5%, 10%, 15%, 20%, 25%, 30%, 35%, 40%, 45%, 50%, 55%, 60%, 65%, 70%, 75%, 80%, 85%, 90%, 95%, or 100%, or by a range defined by any of the two aforementioned. In some embodiments where the improvement is an increase, the change is by more than 100%.

[0025] In some embodiments, the composition comprises an oligonucleotide that targets HGFAC and when administered to a subject in an effective amount improves antibody levels in the subject. The antibody levels may be indicative of an anti-cancer immune response. The improvement may comprise a change. In some embodiments, the change is an increase. in some embodiments, the change is a decrease.

[0026] The antibody levels may include: IgA levels, IgG levels, or IgM levels. In some embodiments, the antibody levels are improved by about 2.5% or more, about 5% or more, or about 7.5% or more, as compared to prior to administration. In some embodiments, the antibody levels are improved by about 10% or more, as compared to prior to administration. In some embodiments, the antibody levels are improved by about 20% or more, about 30% or more, about 40% or more, about 50% or more, about 60% or more, about 70% or more, about 80% or more, about 90% or more, or about 100%, as compared to prior to administration. In some embodiments, the antibody levels are improved by no more than about 2.5%, no more than about 5%, or no more than about 7.5%, as compared to prior to administration. In some embodiments, the antibody levels are improved by no more than about 10%, as compared to prior to administration. In some embodiments, the antibody levels are improved by no more than about 20%, no more than about 30%, no more than about 40%, no more than about 50%, no more than about 60%, no more than about 70%, no more than about 80%, or no more than about 90%, as compared to prior to administration. In some embodiments, the antibody levels are improved by 2.5%, 5%, 7.5%, 10%, 15%, 20%, 25%, 30%, 35%, 40%, 45%, 50%, 55%, 60%, 65%, 70%, 75%, 80%, 85%, 90%, 95%, or 100%, or by a range defined by any of the two aforementioned percentages. In some embodiments where the improvement is an increase, the change is by more than 100%.

[0027] In some embodiments, the composition comprises an oligonucleotide that targets HGFAC and when administered to a subject in an effective amount improves tumor marker levels in the subject. The improvement may comprise a change. In some embodiments, the change is an increase. in some embodiments, the change is a decrease. The tumor marker levels may include levels of tumor markers such as CEA, PSA, CA 125, CA 15-3, CA 19-9, CA 27.29, CA 72-4, AFP, hCG, B2M, BTA, Calcitonin, CgA, CELLSEARCH, DCP, Gastrin, HE4, LDH, NSE, NMP22, or PAP. In some embodiments, the tumor marker levels are improved by about 2.5% or more, about 5% or more, or about 7.5% or more, as compared to prior to administration. In some embodiments, the tumor marker levels are improved by about 10% or more, as compared to prior to administration. In some embodiments, the tumor marker levels are improved by about 20% or more, about 30% or more, about 40% or more, about 50% or more, about 60% or more, about 70% or more, about 80% or more, about 90% or more, or about 100%, as compared to prior to administration. In some embodiments, the tumor marker levels are improved by no more than about 2.5%, no more than about 5%, or no more than about 7.5%, as compared to prior to administration. In some embodiments, the tumor marker levels are improved by no more than about 10%, as compared to prior to administration. In some embodiments, the tumor marker levels are improved by no more than about 20%, no more than about 30%, no more than about 40%, no more than about 50%, no more than about 60%, no more than about 70%, no more than about 80%, or no more than about 90%, as compared to prior to administration. In some embodiments, the tumor marker levels are improved by 2.5%, 5%, 7.5%, 10%, 15%, 20%, 25%, 30%, 35%, 40%, 45%, 50%, 55%, 60%, 65%, 70%, 75%, 80%, 85%, 90%, 95%, or 100%, or by a range defined by any of the two aforementioned percentages. In some embodiments where the improvement is an increase, the change is by more than 100%.

A. siRNAs

[0028] In some embodiments, the composition comprises an oligonucleotide that targets HGFAC, wherein the oligonucleotide comprises a small interfering RNA (siRNA). In some embodiments, the composition comprises an oligonucleotide that targets HGFAC, wherein the oligonucleotide comprises a small interfering RNA (siRNA) comprising a sense strand and an antisense strand.

[0029] In some embodiments, the composition comprises an oligonucleotide that inhibits the expression of HGFAC, wherein the oligonucleotide comprises an siRNA comprising a sense strand and an antisense strand, wherein the sense strand is 12-30 nucleosides in length. In some embodiments, the composition comprises a sense strange that is 10, 11, 12, 13, 14, 15, 16, 17, 18, 19, 20, 21, 22, 23, 24, 25, 26, 27, 28, 29, or 30 nucleosides in length, or a range defined by any of the two aforementioned numbers. The sense strand may be 14-30 nucleosides in length. In some embodiments, the composition comprises an antisense strand is 12-30 nucleosides in length. In some embodiments, the composition comprises an antisense strand that is 10, 11, 12, 13, 14, 15, 16, 17, 18, 19, 20, 21, 22, 23, 24, 25, 26, 27, 28, 29, or 30 nucleosides in length, or a range defined by any of the two aforementioned numbers. The antisense strand may be 14-30 nucleosides in length.

[0030] In some embodiments, the composition comprises an oligonucleotide that inhibits the expression of HGFAC, wherein the oligonucleotide comprises an siRNA comprising a sense strand and an antisense strand, each strand is independently about 12-30 nucleosides in length, and at least one of the sense strand and the antisense strand comprises a nucleoside sequence comprising about 12-30 contiguous nucleosides of a full-length human HGFAC mRNA sequence such as SEQ ID NO: 4803. In some embodiments, at least one of the sense strand and the antisense strand comprise a nucleoside sequence comprising at least about 10, 11, 12, 13, 14, 15, 16, 17, 18, 19, 20, 21, 22, 23, 24, 25, 26, 27, 28, 29, 30, or more contiguous nucleosides of one of SEQ ID NO: 4803.

[0031] In some embodiments, the composition comprises an oligonucleotide that inhibits the expression of HGFAC, wherein the oligonucleotide comprises an siRNA comprising a sense strand and an antisense strand, wherein the sense strand and the antisense strand form a double-stranded RNA duplex. In some embodiments, the first base pair of the double-stranded RNA duplex is an AU base pair.

[0032] In some embodiments, the sense strand further comprises a 3′ overhang. In some embodiments, the 3′ overhang comprises 1, 2, 3, 4, 5, 6, 7, 8, 9, or 10 nucleosides, or a range of nucleotides defined by any two of the aforementioned numbers. In some embodiments, the 3′ overhang comprises 1, 2, or more nucleosides. In some embodiments, the 3′ overhang comprises 2 nucleosides. In some embodiments, the sense strand further comprises a 5′ overhang. In some embodiments, the 5′ overhang comprises 1, 2, 3, 4, 5, 6, 7, 8, 9, or 10 nucleosides, or a range of nucleotides defined by any two of the aforementioned numbers. In some embodiments, the 5′ overhang comprises 1, 2, or more nucleosides. In some embodiments, the 5′ overhang comprises 2 nucleosides.

[0033] In some embodiments, the antisense strand further comprises a 3′ overhang. In some embodiments, the 3′ overhang comprises 1, 2, 3, 4, 5, 6, 7, 8, 9, or 10 nucleosides, or a range of nucleotides defined by any two of the aforementioned numbers. In some embodiments, the 3′ overhang comprises 1, 2, or more nucleosides. In some embodiments, the 3′ overhang comprises 2 nucleosides. In some embodiments, the antisense strand further comprises a 5′ overhang. In some embodiments, the 5′ overhang comprises 1, 2, 3, 4, 5, 6, 7, 8, 9, or 10 nucleosides, or a range of nucleotides defined by any two of the aforementioned numbers. In some embodiments, the 5′ overhang comprises 1, 2, or more nucleosides. In some embodiments, the 5′ overhang comprises 2 nucleosides.

[0034] In some embodiments, the composition comprises an oligonucleotide that inhibits the expression of HGFAC, wherein the oligonucleotide comprises an siRNA comprising a sense strand and an antisense strand, wherein the siRNA binds with a 19mer in a human HGFAC mRNA. In some embodiments, the siRNA binds with a 12mer, a 13mer, a 14mer, a 15mer, a 16mer, a 17mer, a 18mer, a 19mer, a 20mer, a 21mer, a 22mer, a 23mer, a 24mer, or a 25mer in a human HGFAC mRNA.

[0035] In some embodiments, the composition comprises an oligonucleotide that inhibits the expression of HGFAC, wherein the oligonucleotide comprises an siRNA comprising a sense strand and an antisense strand, wherein the siRNA binds with a 17mer in a non-human primate HGFAC mRNA. In some embodiments, the siRNA binds with a 12mer, a 13mer, a 14mer, a 15mer, a 16mer, a 17mer, a 18mer, a 19mer, a 20mer, a 21mer, a 22mer, a 23mer, a 24mer, or a 25mer in a non-human primate HGFAC mRNA.

[0036] In some embodiments, the composition comprises an oligonucleotide that inhibits the expression of HGFAC, wherein the oligonucleotide comprises an siRNA comprising a sense strand and an antisense strand, wherein the siRNA binds with a human HGFAC mRNA and less than or equal to 20 human off-targets, with no more than 2 mismatches in the antisense strand. In some embodiments, the siRNA binds with a human HGFAC mRNA and less than or equal to 10 human off-targets, with no more than 2 mismatches in the antisense strand. In some embodiments, the siRNA binds with a human HGFAC mRNA and less than or equal to 30 human off-targets, with no more than 2 mismatches in the antisense strand. In some embodiments, the siRNA binds with a human HGFAC mRNA and less than or equal to 40 human off-targets, with no more than 2 mismatches in the antisense strand. In some embodiments, the siRNA binds with a human HGFAC mRNA and less than or equal to 50 human off-targets, with no more than 2 mismatches in the antisense strand. In some embodiments, the siRNA binds with a human HGFAC mRNA and less than or equal to 10 human off-targets, with no more than 3 mismatches in the antisense strand. In some embodiments, the siRNA binds with a human HGFAC mRNA and less than or equal to 20 human off-targets, with no more than 3 mismatches in the antisense strand. In some embodiments, the siRNA binds with a human HGFAC mRNA and less than or equal to 30 human off-targets, with no more than 3 mismatches in the antisense strand. In some embodiments, the siRNA binds with a human HGFAC mRNA and less than or equal to 40 human off-targets, with no more than 3 mismatches in the antisense strand. In some embodiments, the siRNA binds with a human HGFAC mRNA and less than or equal to 50 human off-targets, with no more than 3 mismatches in the antisense strand.

[0037] In some embodiments, the composition comprises an oligonucleotide that inhibits the expression of HGFAC, wherein the oligonucleotide comprises an siRNA comprising a sense strand and an antisense strand, siRNA binds with a human HGFAC mRNA target site that does not harbor an SNP, with a minor allele frequency (MAF) greater or equal to 1% (pos. 2-18). In some embodiments, the MAF is greater or equal to about 2%, about 3%, about 4%, about 5%, about 6%, about 7%, about 8%, about 9%, about 10%, about 11%, about 12%, about 13%, about 14%, about 15%, about 16%, about 17%, about 18%, about 19%, or about 20%.

[0038] In some embodiments, the composition comprises an oligonucleotide that inhibits the expression of HGFAC, wherein the oligonucleotide comprises an siRNA comprising a sense strand and an antisense strand, wherein the sense strand comprises a nucleoside sequence comprising or consisting of the sequence of any one of SEQ ID NOs: 1-2051, 4562-4616, or 4757-4779, or a nucleic acid sequence thereof having 1 or 2 nucleoside substitutions, additions, or deletions. In some embodiments, the sense strand comprises a nucleoside sequence comprising or consisting of the sequence of any one of SEQ ID NOs: 1-2051, 4562-4616, or 4757-4779, or a nucleic acid sequence thereof having 3 or 4 nucleoside substitutions, additions, or deletions. In some embodiments, the sense strand further comprises a 3′ overhang. In some embodiments, the 3′ overhang comprises 1, 2, 3, 4, 5, 6, 7, 8, 9, or 10 nucleosides, or a range of nucleotides defined by any two of the aforementioned numbers. In some embodiments, the 3′ overhang comprises 1, 2, or more nucleosides. In some embodiments, the 3′ overhang comprises 2 nucleosides. In some embodiments, the sense strand further comprises a 5′ overhang. In some embodiments, the 5′ overhang comprises 1, 2, 3, 4, 5, 6, 7, 8, 9, or 10 nucleosides, or a range of nucleotides defined by any two of the aforementioned numbers. In some embodiments, the 5′ overhang comprises 1, 2, or more nucleosides. In some embodiments, the 5′ overhang comprises 2 nucleosides. In some embodiments, the sense strand comprises a nucleoside sequence comprising or consisting of the sequence of any one of SEQ ID NOs: 1-2051, 4562-4616, or 4757-4779, or a nucleic acid sequence thereof having 1 or 2 nucleoside additions at the 3′ end. In some embodiments, the composition comprises an oligonucleotide that inhibits the expression of HGFAC, wherein the oligonucleotide comprises an siRNA comprising a sense strand and an antisense strand, wherein the sense strand comprises a nucleoside sequence comprising or consisting of the sequence of any one of SEQ ID NOs: 1-2051, 4562-4616, or 4757-4779.

[0039] In some embodiments, the composition comprises an oligonucleotide that inhibits the expression of HGFAC, wherein the oligonucleotide comprises an siRNA comprising a sense strand and an antisense strand, wherein the sense strand comprises a nucleoside sequence comprising or consisting of the sequence of any one of SEQ ID NOs: 1-2051, or a nucleic acid sequence thereof having 1 or 2 nucleoside substitutions, additions, or deletions. In some embodiments, the sense strand comprises a nucleoside sequence comprising or consisting of the sequence of any one of SEQ ID NOs: 1-2051, or a nucleic acid sequence thereof having 3 or 4 nucleoside substitutions, additions, or deletions. In some embodiments, the sense strand further comprises a 3′ overhang. In some embodiments, the 3′ overhang comprises 1, 2, 3, 4, 5, 6, 7, 8, 9, or 10 nucleosides, or a range of nucleotides defined by any two of the aforementioned numbers. In some embodiments, the 3′ overhang comprises 1, 2, or more nucleosides. In some embodiments, the 3′ overhang comprises 2 nucleosides. In some embodiments, the sense strand further comprises a 5′ overhang. In some embodiments, the 5′ overhang comprises 1, 2, 3, 4, 5, 6, 7, 8, 9, or 10 nucleosides, or a range of nucleotides defined by any two of the aforementioned numbers. In some embodiments, the 5′ overhang comprises 1, 2, or more nucleosides. In some embodiments, the 5′ overhang comprises 2 nucleosides. In some embodiments, the sense strand comprises a nucleoside sequence comprising or consisting of the sequence of any one of SEQ ID NOs: 1-2051, or a nucleic acid sequence thereof having 1 or 2 nucleoside additions at the 3′ end. In some embodiments, the composition comprises an oligonucleotide that inhibits the expression of HGFAC, wherein the oligonucleotide comprises an siRNA comprising a sense strand and an antisense strand, wherein the sense strand comprises a nucleoside sequence comprising or consisting of the sequence of any one of SEQ ID NOs: 1-2051.

[0040] In some embodiments, the composition comprises an oligonucleotide that inhibits the expression of HGFAC, wherein the oligonucleotide comprises an siRNA comprising a sense strand and an antisense strand, wherein the sense strand comprises a nucleoside sequence comprising or consisting of the sequence of any one of SEQ ID NOs: 4562-4616, or a nucleic acid sequence thereof having 1 or 2 nucleoside substitutions, additions, or deletions. In some embodiments, the sense strand comprises a nucleoside sequence comprising or consisting of the sequence of any one of SEQ ID NOs: 4562-4616, or a nucleic acid sequence thereof having 3 or 4 nucleoside substitutions, additions, or deletions. In some embodiments, the sense strand further comprises a 3′ overhang. In some embodiments, the 3′ overhang comprises 1, 2, 3, 4, 5, 6, 7, 8, 9, or 10 nucleosides, or a range of nucleotides defined by any two of the aforementioned numbers. In some embodiments, the 3′ overhang comprises 1, 2, or more nucleosides. In some embodiments, the 3′ overhang comprises 2 nucleosides. In some embodiments, the sense strand further comprises a 5′ overhang. In some embodiments, the 5′ overhang comprises 1, 2, 3, 4, 5, 6, 7, 8, 9, or 10 nucleosides, or a range of nucleotides defined by any two of the aforementioned numbers. In some embodiments, the 5′ overhang comprises 1, 2, or more nucleosides. In some embodiments, the 5′ overhang comprises 2 nucleosides. In some embodiments, the sense strand comprises a nucleoside sequence comprising or consisting of the sequence of any one of SEQ ID NOs: 4562-4616, or a nucleic acid sequence thereof having 1 or 2 nucleoside additions at the 3′ end. In some embodiments, the composition comprises an oligonucleotide that inhibits the expression of HGFAC, wherein the oligonucleotide comprises an siRNA comprising a sense strand and an antisense strand, wherein the sense strand comprises a nucleoside sequence comprising or consisting of the sequence of any one of SEQ ID NOs: 4562-4616.

[0041] In some embodiments, the composition comprises an oligonucleotide that inhibits the expression of HGFAC, wherein the oligonucleotide comprises an siRNA comprising a sense strand and an antisense strand, wherein the sense strand comprises a nucleoside sequence comprising or consisting of the sequence of any one of SEQ ID NOs: 4757-4779, or a nucleic acid sequence thereof having 1 or 2 nucleoside substitutions, additions, or deletions. In some embodiments, the sense strand comprises a nucleoside sequence comprising or consisting of the sequence of any one of SEQ ID NOs: 4757-4779, or a nucleic acid sequence thereof having 3 or 4 nucleoside substitutions, additions, or deletions. In some embodiments, the sense strand further comprises a 3′ overhang. In some embodiments, the 3′ overhang comprises 1, 2, 3, 4, 5, 6, 7, 8, 9, or 10 nucleosides, or a range of nucleotides defined by any two of the aforementioned numbers. In some embodiments, the 3′ overhang comprises 1, 2, or more nucleosides. In some embodiments, the 3′ overhang comprises 2 nucleosides. In some embodiments, the sense strand further comprises a 5′ overhang. In some embodiments, the 5′ overhang comprises 1, 2, 3, 4, 5, 6, 7, 8, 9, or 10 nucleosides, or a range of nucleotides defined by any two of the aforementioned numbers. In some embodiments, the 5′ overhang comprises 1, 2, or more nucleosides. In some embodiments, the 5′ overhang comprises 2 nucleosides. In some embodiments, the sense strand comprises a nucleoside sequence comprising or consisting of the sequence of any one of SEQ ID NOs: 4757-4779, or a nucleic acid sequence thereof having 1 or 2 nucleoside additions at the 3′ end. In some embodiments, the composition comprises an oligonucleotide that inhibits the expression of HGFAC, wherein the oligonucleotide comprises an siRNA comprising a sense strand and an antisense strand, wherein the sense strand comprises a nucleoside sequence comprising or consisting of the sequence of any one of SEQ ID NOs: 4757-4779.

[0042] In some embodiments, the composition comprises an oligonucleotide that inhibits the expression of HGFAC, wherein the oligonucleotide comprises an siRNA comprising a sense strand and an antisense strand, wherein the antisense strand comprises a nucleoside sequence comprising or consisting of the sequence of any one of SEQ ID NOs: 2052-4102, 4617-4671, or 4780-4782, or a nucleic acid sequence thereof having 1 or 2 nucleoside substitutions, additions, or deletions. In some embodiments, the antisense strand sequence comprises a nucleoside sequence comprising or consisting of the sequence of any one of SEQ ID NOs: 2052-4102, 4617-4671, or 4780-4782, or a nucleic acid sequence thereof having 3 or 4 nucleoside substitutions, additions, or deletions. In some embodiments, the antisense strand further comprises a 3′ overhang. In some embodiments, the 3′ overhang comprises 1, 2, 3, 4, 5, 6, 7, 8, 9, or 10 nucleosides, or a range of nucleotides defined by any two of the aforementioned numbers. In some embodiments, the 3′ overhang comprises 1, 2, or more nucleosides. In some embodiments, the 3′ overhang comprises 2 nucleosides. In some embodiments, the antisense strand further comprises a 5′ overhang. In some embodiments, the 5′ overhang comprises 1, 2, 3, 4, 5, 6, 7, 8, 9, or 10 nucleosides, or a range of nucleotides defined by any two of the aforementioned numbers. In some embodiments, the 5′ overhang comprises 1, 2, or more nucleosides. In some embodiments, the 5′ overhang comprises 2 nucleosides. In some embodiments, the antisense strand comprises a nucleoside sequence comprising or consisting of the sequence of any one of SEQ ID NOs: 2052-4102, 4617-4671, or 4780-4782, or a nucleic acid sequence thereof having 1 or 2 nucleoside additions at the 3′ end. In some embodiments, the composition comprises an oligonucleotide that inhibits the expression of HGFAC, wherein the oligonucleotide comprises an siRNA comprising a sense strand and an antisense strand, wherein the antisense strand comprises a nucleoside sequence comprising or consisting of the sequence of any one of SEQ ID NOs: 2052-4102, 4617-4671, or 4780-4782.

[0043] In some embodiments, the composition comprises an oligonucleotide that inhibits the expression of HGFAC, wherein the oligonucleotide comprises an siRNA comprising a sense strand and an antisense strand, wherein the antisense strand comprises a nucleoside sequence comprising or consisting of the sequence of any one of SEQ ID NOs: 2052-4102, or a nucleic acid sequence thereof having 1 or 2 nucleoside substitutions, additions, or deletions. In some embodiments, the antisense strand sequence comprises a nucleoside sequence comprising or consisting of the sequence of any one of SEQ ID NOs: 2052-4102, or a nucleic acid sequence thereof having 3 or 4 nucleoside substitutions, additions, or deletions. In some embodiments, the antisense strand further comprises a 3′ overhang. In some embodiments, the 3′ overhang comprises 1, 2, 3, 4, 5, 6, 7, 8, 9, or 10 nucleosides, or a range of nucleotides defined by any two of the aforementioned numbers. In some embodiments, the 3′ overhang comprises 1, 2, or more nucleosides. In some embodiments, the 3′ overhang comprises 2 nucleosides. In some embodiments, the antisense strand further comprises a 5′ overhang. In some embodiments, the 5′ overhang comprises 1, 2, 3, 4, 5, 6, 7, 8, 9, or 10 nucleosides, or a range of nucleotides defined by any two of the aforementioned numbers. In some embodiments, the 5′ overhang comprises 1, 2, or more nucleosides. In some embodiments, the 5′ overhang comprises 2 nucleosides. In some embodiments, the antisense strand comprises a nucleoside sequence comprising or consisting of the sequence of any one of SEQ ID NOs: 2052-4102, or a nucleic acid sequence thereof having 1 or 2 nucleoside additions at the 3′ end. In some embodiments, the composition comprises an oligonucleotide that inhibits the expression of HGFAC, wherein the oligonucleotide comprises an siRNA comprising a sense strand and an antisense strand, wherein the antisense strand comprises a nucleoside sequence comprising or consisting of the sequence of any one of SEQ ID NOs: 2052-4102.

[0044] In some embodiments, the composition comprises an oligonucleotide that inhibits the expression of HGFAC, wherein the oligonucleotide comprises an siRNA comprising a sense strand and an antisense strand, wherein the antisense strand comprises a nucleoside sequence comprising or consisting of the sequence of any one of SEQ ID NOs: 4617-4671, or a nucleic acid sequence thereof having 1 or 2 nucleoside substitutions, additions, or deletions. In some embodiments, the antisense strand sequence comprises a nucleoside sequence comprising or consisting of the sequence of any one of SEQ ID NOs: 4617-4671, or a nucleic acid sequence thereof having 3 or 4 nucleoside substitutions, additions, or deletions. In some embodiments, the antisense strand further comprises a 3′ overhang. In some embodiments, the 3′ overhang comprises 1, 2, 3, 4, 5, 6, 7, 8, 9, or 10 nucleosides, or a range of nucleotides defined by any two of the aforementioned numbers. In some embodiments, the 3′ overhang comprises 1, 2, or more nucleosides. In some embodiments, the 3′ overhang comprises 2 nucleosides. In some embodiments, the antisense strand further comprises a 5′ overhang. In some embodiments, the 5′ overhang comprises 1, 2, 3, 4, 5, 6, 7, 8, 9, or 10 nucleosides, or a range of nucleotides defined by any two of the aforementioned numbers. In some embodiments, the 5′ overhang comprises 1, 2, or more nucleosides. In some embodiments, the 5′ overhang comprises 2 nucleosides. In some embodiments, the antisense strand comprises a nucleoside sequence comprising or consisting of the sequence of any one of SEQ ID NOs: 4617-4671, or a nucleic acid sequence thereof having 1 or 2 nucleoside additions at the 3′ end. In some embodiments, the composition comprises an oligonucleotide that inhibits the expression of HGFAC, wherein the oligonucleotide comprises an siRNA comprising a sense strand and an antisense strand, wherein the antisense strand comprises a nucleoside sequence comprising or consisting of the sequence of any one of SEQ ID NOs: 4617-4671.

[0045] In some embodiments, the composition comprises an oligonucleotide that inhibits the expression of HGFAC, wherein the oligonucleotide comprises an siRNA comprising a sense strand and an antisense strand, wherein the antisense strand comprises a nucleoside sequence comprising or consisting of the sequence of any one of SEQ ID NOs: 4780-4782, or a nucleic acid sequence thereof having 1 or 2 nucleoside substitutions, additions, or deletions. In some embodiments, the antisense strand sequence comprises a nucleoside sequence comprising or consisting of the sequence of any one of SEQ ID NOs: 4780-4782, or a nucleic acid sequence thereof having 3 or 4 nucleoside substitutions, additions, or deletions. In some embodiments, the antisense strand further comprises a 3′ overhang. In some embodiments, the 3′ overhang comprises 1, 2, 3, 4, 5, 6, 7, 8, 9, or 10 nucleosides, or a range of nucleotides defined by any two of the aforementioned numbers. In some embodiments, the 3′ overhang comprises 1, 2, or more nucleosides. In some embodiments, the 3′ overhang comprises 2 nucleosides. In some embodiments, the antisense strand further comprises a 5′ overhang. In some embodiments, the 5′ overhang comprises 1, 2, 3, 4, 5, 6, 7, 8, 9, or 10 nucleosides, or a range of nucleotides defined by any two of the aforementioned numbers. In some embodiments, the 5′ overhang comprises 1, 2, or more nucleosides. In some embodiments, the 5′ overhang comprises 2 nucleosides. In some embodiments, the antisense strand comprises a nucleoside sequence comprising or consisting of the sequence of any one of SEQ ID NOs: 4780-4782, or a nucleic acid sequence thereof having 1 or 2 nucleoside additions at the 3′ end. In some embodiments, the composition comprises an oligonucleotide that inhibits the expression of HGFAC, wherein the oligonucleotide comprises an siRNA comprising a sense strand and an antisense strand, wherein the antisense strand comprises a nucleoside sequence comprising or consisting of the sequence of any one of SEQ ID NOs: 4780-4782.

[0046] In some embodiments, the siRNA comprises the sense strand and/or the antisense strand sequence of an siRNA in any one of Tables A-E, G, H, 5, 14 or a nucleic acid sequence thereof having 3 or 4 nucleoside substitutions, additions, or deletions. In some embodiments, the siRNA comprises the sense strand and/or the antisense strand sequence of an siRNA in any one of Tables A-E, G, H, 5, 14 or a nucleic acid sequence thereof having 1 or 2 nucleoside substitutions, additions, or deletions. In some embodiments, the siRNA comprises the sense strand and/or the antisense strand sequence of an siRNA in any one of Tables A-E, G, H, 5, 14. In some embodiments, the siRNA is cross-reactive with a non-human primate (NHP) HGFAC mRNA. The siRNA may include one or more internucleoside linkages and/or one or more nucleoside modifications.

[0047] In some embodiments, the siRNA comprises the sense strand and/or the antisense strand sequence of an siRNA of subset A, or a nucleic acid sequence thereof having 3 or 4 nucleoside substitutions, additions, or deletions. In some embodiments, the siRNA comprises the sense strand and/or the antisense strand sequence of an siRNA of subset A, or a nucleic acid sequence thereof having 1 or 2 nucleoside substitutions, additions, or deletions. In some embodiments, the siRNA comprises the sense strand and/or the antisense strand sequence of an siRNA of subset A. In some embodiments, the siRNA is cross-reactive with a non-human primate (NHP) HGFAC mRNA. The siRNA may include one or more internucleoside linkages and/or one or more nucleoside modifications.

[0048] In some embodiments, the siRNA comprises the sense strand and/or the antisense strand sequence of an siRNA of subset B, or a nucleic acid sequence thereof having 3 or 4 nucleoside substitutions, additions, or deletions. In some embodiments, the siRNA comprises the sense strand and/or the antisense strand sequence of an siRNA of subset B, or a nucleic acid sequence thereof having 1 or 2 nucleoside substitutions, additions, or deletions. In some embodiments, the siRNA comprises the sense strand and/or the antisense strand sequence of an siRNA of subset B. In some embodiments, the siRNA is cross-reactive with a non-human primate (NHP) HGFAC mRNA. The siRNA may include one or more internucleoside linkages and/or one or more nucleoside modifications.

[0049] In some embodiments, the siRNA comprises the sense strand and/or the antisense strand sequence of an siRNA of subset C, or a nucleic acid sequence thereof having 3 or 4 nucleoside substitutions, additions, or deletions. In some embodiments, the siRNA comprises the sense strand and/or the antisense strand sequence of an siRNA of subset C, or a nucleic acid sequence thereof having 1 or 2 nucleoside substitutions, additions, or deletions. In some embodiments, the siRNA comprises the sense strand and/or the antisense strand sequence of an siRNA of subset C. In some embodiments, the siRNA is cross-reactive with a non-human primate (NHP) HGFAC mRNA. The siRNA may include one or more internucleoside linkages and/or one or more nucleoside modifications.

[0050] In some embodiments, the siRNA comprises the sense strand and/or the antisense strand sequence of an siRNA of subset D, or a nucleic acid sequence thereof having 3 or 4 nucleoside substitutions, additions, or deletions. In some embodiments, the siRNA comprises the sense strand and/or the antisense strand sequence of an siRNA of subset D, or a nucleic acid sequence thereof having 1 or 2 nucleoside substitutions, additions, or deletions. In some embodiments, the siRNA comprises the sense strand and/or the antisense strand sequence of an siRNA of subset D. In some embodiments, the siRNA is cross-reactive with a non-human primate (NHP) HGFAC mRNA. The siRNA may include one or more internucleoside linkages and/or one or more nucleoside modifications.

[0051] In some embodiments, the siRNA comprises the sense strand and/or the antisense strand sequence of an siRNA of subset E, or a nucleic acid sequence thereof having 3 or 4 nucleoside substitutions, additions, or deletions. In some embodiments, the siRNA comprises the sense strand and/or the antisense strand sequence of an siRNA of subset E, or a nucleic acid sequence thereof having 1 or 2 nucleoside substitutions, additions, or deletions. In some embodiments, the siRNA comprises the sense strand and/or the antisense strand sequence of an siRNA of subset E. In some embodiments, the siRNA is cross-reactive with a non-human primate (NHP) HGFAC mRNA. The siRNA may include one or more internucleoside linkages and/or one or more nucleoside modifications.

[0052] In some embodiments, the siRNA comprises the sense strand and/or the antisense strand sequence of an siRNA of subset G, or a nucleic acid sequence thereof having 3 or 4 nucleoside substitutions, additions, or deletions. In some embodiments, the siRNA comprises the sense strand and/or the antisense strand sequence of an siRNA of subset G, or a nucleic acid sequence thereof having 1 or 2 nucleoside substitutions, additions, or deletions. In some embodiments, the siRNA comprises the sense strand and/or the antisense strand sequence of an siRNA of subset G. In some embodiments, the siRNA is cross-reactive with a non-human primate (NHP) HGFAC mRNA. The siRNA may include one or more internucleoside linkages and/or one or more nucleoside modifications.

[0053] In some embodiments, the siRNA comprises the sense strand and/or the antisense strand sequence of an siRNA of subset H, or a nucleic acid sequence thereof having 3 or 4 nucleoside substitutions, additions, or deletions. In some embodiments, the siRNA comprises the sense strand and/or the antisense strand sequence of an siRNA of subset H, or a nucleic acid sequence thereof having 1 or 2 nucleoside substitutions, additions, or deletions. In some embodiments, the siRNA comprises the sense strand and/or the antisense strand sequence of an siRNA of subset H. In some embodiments, the siRNA is cross-reactive with a non-human primate (NHP) HGFAC mRNA. The siRNA may include one or more internucleoside linkages and/or one or more nucleoside modifications.

[0054] In some embodiments, the siRNA comprises the sense strand and/or the antisense strand sequence of an siRNA of Table 5, or a nucleic acid sequence thereof having 3 or 4 nucleoside substitutions, additions, or deletions. In some embodiments, the siRNA comprises the sense strand and/or the antisense strand sequence of an siRNA of Table 5, or a nucleic acid sequence thereof having 1 or 2 nucleoside substitutions, additions, or deletions. In some embodiments, the siRNA comprises the sense strand and/or the antisense strand sequence of an siRNA of Table 5. In some embodiments, the siRNA is cross-reactive with a non-human primate (NHP) HGFAC mRNA. The siRNA may include one or more internucleoside linkages and/or one or more nucleoside modifications. Any of the aforementioned siRNAs may include a sense strand that lacks a 3′ A of a sense strand sequence in Table 5. Any of the aforementioned siRNAs may include a sense strand that lacks a 5′ U of an antisense strand sequence in Table 5.

[0055] In some embodiments, the siRNA comprises the sense strand and/or the antisense strand sequence of an siRNA of Table 14, or a nucleic acid sequence thereof having 3 or 4 nucleoside substitutions, additions, or deletions. In some embodiments, the siRNA comprises the sense strand and/or the antisense strand sequence of an siRNA of Table 14, or a nucleic acid sequence thereof having 1 or 2 nucleoside substitutions, additions, or deletions. In some embodiments, the siRNA comprises the sense strand and/or the antisense strand sequence of an siRNA of Table 14. In some embodiments, the siRNA is cross-reactive with a non-human primate (NHP) HGFAC mRNA. The siRNA may include one or more internucleoside linkages and/or one or more nucleoside modifications. Any of the aforementioned siRNAs may include a sense strand that lacks a 3′ A of a sense strand sequence in Table 14. Any of the aforementioned siRNAs may include a sense strand that lacks a 5′ U of an antisense strand sequence in Table 14.

### B. ASOs

[0056] In some embodiments, the composition comprises an oligonucleotide that inhibits the expression of HGFAC, wherein the oligonucleotide comprises an antisense oligonucleotide (ASO). In some embodiments, the ASO is 12-30 nucleosides in length. In some embodiments, the ASO is 14-30 nucleosides in length. In some embodiments, the ASO is at least about 10, 11, 12, 13, 14, 15, 16, 17, 18, 19, 20, 21, 22, 23, 24, 25, 26, 27, 28, 29, or 30 nucleosides in length, or a range defined by any of the two aforementioned numbers. In some embodiments, the ASO is 15-25 nucleosides in length. In some embodiments, the ASO is 20 nucleosides in length.

[0057] In some embodiments, the composition comprises an oligonucleotide that inhibits the expression of HGFAC, wherein the oligonucleotide comprises an ASO about 12-30 nucleosides in length and comprising a nucleoside sequence complementary to about 12-30 contiguous nucleosides of a full-length human HGFAC mRNA sequence such as SEQ ID NO: 4803; wherein (i) the oligonucleotide comprises a modification comprising a modified nucleoside and/or a modified internucleoside linkage, and/or (ii) the composition comprises a pharmaceutically acceptable carrier. In some embodiments, the ASO comprise a nucleoside sequence complementary to at least about 10, 11, 12, 13, 14, 15, 16, 17, 18, 19, 20, 21, 22, 23, 24, 25, 26, 27, 28, 29, 30, or more contiguous nucleosides of one of SEQ ID NO: 4803.

### C. Modifications

[0058] In some embodiments, the composition comprises an oligonucleotide that inhibits the expression of HGFAC, wherein the oligonucleotide comprises a modification comprising a modified nucleoside and/or a modified internucleoside linkage, and/or (ii) the composition comprises a pharmaceutically acceptable carrier. In some embodiments, the oligonucleotide comprises a modification comprising a modified nucleoside and/or a modified internucleoside linkage. In some embodiments, the oligonucleotide comprises a modified internucleoside linkage. In some embodiments, the modified internucleoside linkage comprises alkylphosphonate, phosphorothioate, methylphosphonate, phosphorodithioate, alkylphosphonothioate, phosphoramidate, carbamate, carbonate, phosphate triester, acetamidate, or carboxymethyl ester, or a combination thereof. In some embodiments, the modified internucleoside linkage comprises one or more phosphorothioate linkages. A phosphorothioate may include a nonbridging oxygen atom in a phosphate backbone of the oligonucleotide that is replaced by sulfur. Modified internucleoside linkages may be included in siRNAs or ASOs. Benefits of the modified internucleoside linkage may include decreased toxicity or improved pharmacokinetics.

[0059] In some embodiments, the composition comprises an oligonucleotide that inhibits the expression of HGFAC, wherein the oligonucleotide comprises a modified internucleoside linkage, wherein the oligonucleotide comprises 1, 2, 3, 4, 5, 6, 7, 8, 9, 10, 11, 12, 13, 14, 15, 16, 17, 18, 19, or 20 modified internucleoside linkages, or a range of modified internucleoside linkages defined by any two of the aforementioned numbers. In some embodiments, the oligonucleotide comprises no more than 18 modified internucleoside linkages. In some embodiments, the oligonucleotide comprises no more than 20 modified internucleoside linkages. In some embodiments, the oligonucleotide comprises 2 or more modified internucleoside linkages, 3 or more modified internucleoside linkages, 4 or more modified internucleoside linkages, 5 or more modified internucleoside linkages, 6 or more modified internucleoside linkages, 7 or more modified internucleoside linkages, 8 or more modified internucleoside linkages, 9 or more modified internucleoside linkages, 10 or more modified internucleoside linkages, 11 or more modified internucleoside linkages, 12 or more modified internucleoside linkages, 13 or more modified internucleoside linkages, 14 or more modified internucleoside linkages, 15 or more modified internucleoside linkages, 16 or more modified internucleoside linkages, 17 or more modified internucleoside linkages, 18 or more modified internucleoside linkages, 19 or more modified internucleoside linkages, or 20 or more modified internucleoside linkages.

[0060] In some embodiments, the composition comprises an oligonucleotide that inhibits the expression of HGFAC, wherein the oligonucleotide comprises the modified nucleoside. In some embodiments, the modified nucleoside comprises a locked nucleic acid (LNA), hexitol nucleic acid (HLA), cyclohexene nucleic acid (CeNA), 2′-methoxyethyl, 2′-O-alkyl, 2′-O-allyl, 2′-fluoro, or 2′-deoxy, or a combination thereof. In some embodiments, the modified nucleoside comprises a LNA. In some embodiments, the modified nucleoside comprises a 2′,4′ constrained ethyl nucleic acid. In some embodiments, the modified nucleoside comprises HLA. In some embodiments, the modified nucleoside comprises CeNA. In some embodiments, the modified nucleoside comprises a 2′-methoxyethyl group. In some embodiments, the modified nucleoside comprises a 2′-O-alkyl group. In some embodiments, the modified nucleoside comprises a 2′-O-allyl group. In some embodiments, the modified nucleoside comprises a 2′-fluoro group. In some embodiments, the modified nucleoside comprises a 2′-deoxy group. In some embodiments, the modified nucleoside comprises a 2′-O-methyl nucleoside, 2′-deoxyfluoro nucleoside, 2′-O—N-methylacetamido (2′-O-NMA) nucleoside, a 2′-O-dimethylaminoethoxyethyl (2′-O-DMAEOE) nucleoside, 2′-O-aminopropyl (2′-O-AP) nucleoside, or 2′-ara-F, or a combination thereof. In some embodiments, the modified nucleoside comprises a 2′-O-methyl nucleoside. In some embodiments, the modified nucleoside comprises a 2′-deoxyfluoro nucleoside. In some embodiments, the modified nucleoside comprises a 2′-O-NMA nucleoside. In some embodiments, the modified nucleoside comprises a 2′-O-DMAEOE nucleoside. In some embodiments, the modified nucleoside comprises a 2′-O-aminopropyl (2′-O-AP) nucleoside. In some embodiments, the modified nucleoside comprises 2′-ara-F. In some embodiments, the modified nucleoside comprises one or more 2′fluoro modified nucleosides. In some embodiments, the modified nucleoside comprises a 2′ O-alkyl modified nucleoside. Benefits of the modified nucleoside may include decreased toxicity or improved pharmacokinetics.

[0061] In some embodiments, the oligonucleotide comprises 1, 2, 3, 4, 5, 6, 7, 8, 9, 10, 11, 12, 13, 14, 15, 16, 17, 18, 19, 20, or 21 modified nucleosides, or a range of nucleosides defined by any two of the aforementioned numbers. In some embodiments, the oligonucleotide comprises no more than 19 modified nucleosides. In some embodiments, the oligonucleotide comprises no more than 21 modified nucleosides. In some embodiments, the oligonucleotide comprises 2 or more modified nucleosides, 3 or more modified nucleosides, 4 or more modified nucleosides, 5 or more modified nucleosides, 6 or more modified nucleosides, 7 or more modified nucleosides, 8 or more modified nucleosides, 9 or more modified nucleosides, 10 or more modified nucleosides, 11 or more modified nucleosides, 12 or more modified nucleosides, 13 or more modified nucleosides, 14 or more modified nucleosides, 15 or more modified nucleosides, 16 or more modified nucleosides, 17 or more modified nucleosides, 18 or more modified nucleosides, 19 or more modified nucleosides, 20 or more modified nucleosides, or 21 or more modified nucleosides.

[0062] In some embodiments, the composition comprises an oligonucleotide that inhibits the expression of HGFAC, wherein the oligonucleotide comprises a moiety attached at a 3′ or 5′ terminus of the oligonucleotide. Examples of moieties include a hydrophobic moiety or a sugar moiety, or a combination thereof. In some embodiments, the oligonucleotide is an siRNA having a sense strand, and the moiety is attached to a 5′ end of the sense strand. In some embodiments, the oligonucleotide is an siRNA having a sense strand, and the moiety is attached to a 3′ end of the sense strand. In some embodiments, the oligonucleotide is an siRNA having an antisense strand, and the moiety is attached to a 5′ end of the antisense strand. In some embodiments, the oligonucleotide is an siRNA having an antisense strand, and the moiety is attached to a 3′ end of the antisense strand. In some embodiments, the oligonucleotide is an ASO, and the moiety is attached to a 5′ end of the ASO. In some embodiments, the oligonucleotide is an ASO, and the moiety is attached to a 3′ end of the ASO.

[0063] In some embodiments, the composition comprises an oligonucleotide that inhibits the expression of HGFAC, wherein the oligonucleotide comprises a hydrophobic moiety. The hydrophobic moiety may be attached at a 3′ or 5′ terminus of the oligonucleotide. The hydrophobic moiety may include a lipid such as a fatty acid. The hydrophobic moiety may include a hydrocarbon. The hydrocarbon may be linear. The hydrocarbon may be non-linear. The hydrophobic moiety may include a lipid moiety or a cholesterol moiety, or a combination thereof.

[0064] In some embodiments, the composition comprises an oligonucleotide that inhibits the expression of HGFAC, wherein the oligonucleotide comprises a lipid attached at a 3′ or 5′ terminus of the oligonucleotide. In some embodiments, the lipid comprises cholesterol, myristoyl, palmitoyl, stearoyl, lithocholoyl, docosanoyl, docosahexaenoyl, myristyl, palmityl stearyl, or α-tocopherol, or a combination thereof.

[0065] In some embodiments, the composition comprises an oligonucleotide that inhibits the expression of HGFAC, wherein the oligonucleotide comprises a sugar moiety. The sugar moiety may include an N-acetyl galactose moiety (e.g., an N-acetylgalactosamine (GalNAc) moiety), an N-acetyl glucose moiety (e.g., an N-acetylglucosamine (GlcNAc) moiety), a fucose moiety, or a mannose moiety. The sugar moiety may include 1, 2, 3, or more sugar molecules. The sugar moiety may be attached at a 3′ or 5′ terminus of the oligonucleotide. The sugar moiety may include an N-acetyl galactose moiety. The sugar moiety may include an N-acetylgalactosamine (GalNAc) moiety. The sugar moiety may include an N-acetyl glucose moiety. The sugar moiety may include N-acetylglucosamine (GlcNAc) moiety. The sugar moiety may include a fucose moiety. The sugar moiety may include a mannose moiety. N-acetyl glucose, GlcNAc, fucose, or mannose may be useful for targeting macrophages since they may target or bind a mannose receptor such as CD206.

[0066] In some embodiments, the composition comprises an oligonucleotide that inhibits the expression of HGFAC, wherein the oligonucleotide comprises an N-acetylgalactosamine (GalNAc) moiety. GalNAc may be useful for hepatocyte targeting. The GalNAc moiety may include a bivalent or trivalent branched linker. The oligo may be attached to 1, 2 or 3 GalNAcs through a bivalent or trivalent branched linker. The GalNAc moiety may include 1, 2, 3, or more GalNAc molecules. The GalNAc moiety may be attached at a 3′ or 5′ terminus of the oligonucleotide.

[0067] The oligonucleotide may include purines. Examples of purines include adenine (A) or guanine (G), or modified versions thereof. The oligonucleotide may include pyrimidines. Examples of pyrimidines include cytosine (C), thymine (T), or uracil (U), or modified versions thereof.

[0068] In some embodiments, purines of the oligonucleotide comprise 2′ fluoro modified purines. In some embodiments, purines of the oligonucleotide comprise 2′-O-methyl modified purines. In some embodiments, purines of the oligonucleotide comprise a mixture of 2′ fluoro and 2′-O-methyl modified purines. In some embodiments, all purines of the oligonucleotide comprise 2′ fluoro modified purines. In some embodiments, all purines of the oligonucleotide comprise 2′-O-methyl modified purines. In some embodiments, all purines of the oligonucleotide comprise a mixture of 2′ fluoro and 2′-O-methyl modified purines. In some embodiments, 2′-O-methyl includes 2′ O-methyl.

[0069] In some embodiments, pyrimidines of the oligonucleotide comprise 2′ fluoro modified pyrimidines. In some embodiments, pyrimidines of the oligonucleotide comprise 2′-O-methyl modified pyrimidines. In some embodiments, pyrimidines of the oligonucleotide comprise a mixture of 2′ fluoro and 2′-O-methyl modified pyrimidines. In some embodiments, all pyrimidines of the oligonucleotide comprise 2′ fluoro modified pyrimidines. In some embodiments, all pyrimidines of the oligonucleotide comprise 2′-O-methyl modified pyrimidines. In some embodiments, all pyrimidines of the oligonucleotide comprise a mixture of 2′ fluoro and 2′-O-methyl modified pyrimidines. In some embodiments, purines of the oligonucleotide comprise 2′ fluoro modified purines, and pyrimidines of the oligonucleotide comprise a mixture of 2′ fluoro and 2′-O-methyl modified pyrimidines. In some embodiments, purines of the oligonucleotide comprise 2′-O-methyl modified purines, and pyrimidines of the oligonucleotide comprise a mixture of 2′ fluoro and 2′-O-methyl modified pyrimidines. In some embodiments, purines of the oligonucleotide comprise 2′ fluoro modified purines, and pyrimidines of the oligonucleotide comprise 2′-O-methyl modified pyrimidines. In some embodiments, purines of the oligonucleotide comprise 2′-O-methyl modified purines, and pyrimidines of the oligonucleotide comprise 2′ fluoro modified pyrimidines. In some embodiments, pyrimidines of the oligonucleotide comprise 2′ fluoro modified pyrimidines, and purines of the oligonucleotide comprise a mixture of 2′ fluoro and 2′-O-methyl modified purines. In some embodiments, pyrimidines of the oligonucleotide comprise 2′-O-methyl modified pyrimidines, and purines of the oligonucleotide comprise a mixture of 2′ fluoro and 2′-O-methyl modified purines. In some embodiments, pyrimidines of the oligonucleotide comprise 2′ fluoro modified pyrimidines, and purines of the oligonucleotide comprise 2′-O-methyl modified purines. In some embodiments, pyrimidines of the oligonucleotide comprise 2′-O-methyl modified pyrimidines, and purines of the oligonucleotide comprise 2′ fluoro modified purines.

[0070] In some embodiments, all purines of the oligonucleotide comprise 2′ fluoro modified purines, and all pyrimidines of the oligonucleotide comprise a mixture of 2′ fluoro and 2′-O-methyl modified pyrimidines. In some embodiments, all purines of the oligonucleotide comprise 2′-O-methyl modified purines, and all pyrimidines of the oligonucleotide comprise a mixture of 2′ fluoro and 2′-O-methyl modified pyrimidines. In some embodiments, all purines of the oligonucleotide comprise 2′ fluoro modified purines, and all pyrimidines of the oligonucleotide comprise 2′-O-methyl modified pyrimidines. In some embodiments, all purines of the oligonucleotide comprise 2′-O-methyl modified purines, and all pyrimidines of the oligonucleotide comprise 2′ fluoro modified pyrimidines. In some embodiments, all pyrimidines of the oligonucleotide comprise 2′ fluoro modified pyrimidines, and all purines of the oligonucleotide comprise a mixture of 2′ fluoro and 2′-O-methyl modified purines. In some embodiments, all pyrimidines of the oligonucleotide comprise 2′-O-methyl modified pyrimidines, and all purines of the oligonucleotide comprise a mixture of 2′ fluoro and 2′-O-methyl modified purines. In some embodiments, all pyrimidines of the oligonucleotide comprise 2′ fluoro modified pyrimidines, and all purines of the oligonucleotide comprise 2′-O-methyl modified purines. In some embodiments, all pyrimidines of the oligonucleotide comprise 2′-O-methyl modified pyrimidines, and all purines of the oligonucleotide comprise 2′ fluoro modified purines.

[0071] In some cases, the oligonucleotide comprises a particular modification pattern. In some embodiments, position 9 counting from the 5′ end of the of a strand of the oligonucleotide may have a 2′F modification. In some embodiments, when position 9 of a strand of the oligonucleotide is a pyrimidine, then all purines in a strand of the oligonucleotide have a 2′OMe modification. In some embodiments, when position 9 is the only pyrimidine between positions 5 and 11 of the sense stand, then position 9 is the only position with a 2′F modification in a strand of the oligonucleotide. In some embodiments, when position 9 and only one other base between positions 5 and 11 of a strand of the oligonucleotide are pyrimidines, then both of these pyrimidines are the only two positions with a 2′F modification in a strand of the oligonucleotide. In some embodiments, when position 9 and only two other bases between positions 5 and 11 of a strand of the oligonucleotide are pyrimidines, and those two other pyrimidines are in adjacent positions so that there would be not three 2′F modifications in a row, then any combination of 2′F modifications can be made that give three 2′F modifications in total. In some embodiments, when there are more than 2 pyrimidines between positions 5 and 11 of a strand of the oligonucleotide, then all combinations of pyrimidines having the 2′F modification are allowed that have three to five 2′F modifications in total, provided that a strand of the oligonucleotide does not have three 2′F modifications in a row. In some cases, a strand of the oligonucleotide of any of the siRNAs comprises a modification pattern which conforms to any or all of these a strand of the oligonucleotide rules.

[0072] In some embodiments, when position 9 of a strand of the oligonucleotide is a purine, then all purines in a strand of the oligonucleotide have a 2′OMe modification. In some embodiments, when position 9 is the only purine between positions 5 and 11 of the sense stand, then position 9 is the only position with a 2′F modification in a strand of the oligonucleotide. In some embodiments, when position 9 and only one other base between positions 5 and 11 of a strand of the oligonucleotide are purines, then both of these purines are the only two positions with a 2′F modification in a strand of the oligonucleotide. In some embodiments, when position 9 and only two other bases between positions 5 and 11 of a strand of the oligonucleotide are purines, and those two other purines are in adjacent positions so that there would be not three 2′F modifications in a row, then any combination of 2′F modifications can be made that give three 2′F modifications in total. In some embodiments, when there are more than 2 purines between positions 5 and 11 of a strand of the oligonucleotide, then all combinations of purines having the 2′F modification are allowed that have three to five 2′F modifications in total, provided that a strand of the oligonucleotide does not have three 2′F modifications in a row. In some cases, a strand of the oligonucleotide of any of the siRNAs comprises a modification pattern which conforms to any or all of these a strand of the oligonucleotide rules.

[0073] In some cases, position 9 of a strand of the oligonucleotide can be a 2′deoxy. In these cases, 2′F and 2′OMe modifications may occur at the other positions of a strand of the oligonucleotide. In some cases, a strand of the oligonucleotide of any of the siRNAs comprises a modification pattern which conforms to these a strand of the oligonucleotide rules.

[0074] In some embodiments, position nine of the sense strand comprises a 2′ fluoro-modified pyrimidine. In some embodiments, all purines of the sense strand comprise 2′-O-methyl modified purines. In some embodiments, 1, 2, 3, 4, or 5 pyrimidines between positions 5 and 11 comprise a 2′flouro-modified pyrimidine, provided there are not three 2′ fluoro-modified pyrimidines in a row. In some embodiments, the odd-numbered positions of the antisense strand comprise 2′-O-methyl modified nucleotides. In some embodiments, the even-numbered positions of the antisense strand comprise 2′flouro-modified nucleotides and unmodified deoxyribonucleotide. In some embodiments, the even-numbered positions of the antisense strand comprise 2′flouro-modified nucleotides, 2′-O-methyl modified nucleotides and unmodified deoxyribonucleotide. In some embodiments, position nine of the sense strand comprises a 2′ fluoro-modified pyrimidine; all purines of the sense strand comprises 2′-O-methyl modified purines; 1, 2, 3, 4, or 5 pyrimidines between positions 5 and 11 comprise a 2′flouro-modified pyrimidine, provided there are not three 2′ fluoro-modified pyrimidines in a row; the odd-numbered positions of the antisense strand comprise 2′-O-methyl modified nucleotides; and the even-numbered positions of the antisense strand comprise 2′flouro-modified nucleotides and unmodified deoxyribonucleotides.

[0075] In some embodiments, position nine of the sense strand comprises a 2′ fluoro-modified purine. In some embodiments, all pyrimidines of the sense strand comprise 2′-O-methyl modified purines. In some embodiments, 1, 2, 3, 4, or 5 purines between positions 5 and 11 comprise a 2′flouro-modified purine, provided there are not three 2′ fluoro-modified purine in a row. In some embodiments, the odd-numbered positions of the antisense strand comprise 2′-O-methyl modified nucleotides. In some embodiments, the even-numbered positions of the antisense strand comprise 2′flouro-modified nucleotides and unmodified deoxyribonucleotide. In some embodiments, the even-numbered positions of the antisense strand comprise 2′flouro-modified nucleotides, 2′-O-methyl modified nucleotides and unmodified deoxyribonucleotide. In some embodiments, position nine of the sense strand comprises a 2′ fluoro-modified purine; all pyrimidine of the sense strand comprises 2′-O-methyl modified pyrimidines; 1, 2, 3, 4, or 5 purines between positions 5 and 11 comprise a 2′flouro-modified purines, provided there are not three 2′ fluoro-modified purines in a row; the odd-numbered positions of the antisense strand comprise 2′-O-methyl modified nucleotides; and the even-numbered positions of the antisense strand comprise 2′flouro-modified nucleotides and unmodified deoxyribonucleotides. In some embodiments, there are not three 2′ fluoro-modified purines in a row. In some embodiments, there are not three 2′ fluoro-modified pyrimidines in a row.

[0076] In some embodiments, position nine of the sense strand comprises an unmodified deoxyribonucleotide. In some embodiments, positions 5, 7, and 8 of the sense strand comprise 2′fluoro-modified nucleotides. In some embodiments, all pyrimidines in positions 10 to 21 of the sense strand comprise 2′-O-methyl modified pyrimidines and all purines in positions 10 to 21 of the comprise 2′-O-methyl modified purines or 2′fluoro-modified purines. In some embodiments, the odd-numbered positions of the antisense strand comprise 2′-O-methyl modified nucleotides. In some embodiments, the even-numbered positions of the antisense strand comprise 2′flouro-modified nucleotides and unmodified deoxyribonucleotides. In some embodiments, the even-numbered positions of the antisense strand comprise 2′flouro-modified nucleotides, 2′-O-methyl modified nucleotides and unmodified deoxyribonucleotides. In some embodiments, position nine of the sense strand comprises an unmodified deoxyribonucleotide; positions 5, 7, and 8 of the sense strand comprise 2′fluoro-modified nucleotides; all pyrimidines in positions 10 to 21 of the sense strand comprise 2′-O-methyl modified pyrimidines and all purines in positions 10 to 21 of the comprise 2′-O-methyl modified purines or 2′fluoro-modified purines; the odd-numbered positions of the antisense strand comprise 2′-O-methyl modified nucleotides; and the even-numbered positions of the antisense strand comprise 2′flouro-modified nucleotides and unmodified deoxyribonucleotides.

[0077] In some embodiments, position nine of the sense strand comprises an unmodified deoxyribonucleotide. In some embodiments, positions 5, 7, and 8 of the sense strand comprise 2′fluoro-modified nucleotides. In some embodiments, all purines in positions 10 to 21 of the sense strand comprise 2′-O-methyl modified purines and all pyrimidines in positions 10 to 21 of the comprise 2′-O-methyl modified pyrimidines or 2′fluoro-modified pyrimidines. In some embodiments, the odd-numbered positions of the antisense strand comprise 2′-O-methyl modified nucleotides. In some embodiments, the even-numbered positions of the antisense strand comprise 2′flouro-modified nucleotides and unmodified deoxyribonucleotides. In some embodiments, the even-numbered positions of the antisense strand comprise 2′flouro-modified nucleotides, 2′-O-methyl modified nucleotides and unmodified deoxyribonucleotides. In some embodiments, position nine of the sense strand comprises an unmodified deoxyribonucleotide; positions 5, 7, and 8 of the sense strand comprise 2′fluoro-modified nucleotides; all purines in positions 10 to 21 of the sense strand comprise 2′-O-methyl modified purines and all pyrimidines in positions 10 to 21 of the comprise 2′-O-methyl modified pyrimidines or 2′fluoro-modified pyrimidines; the odd-numbered positions of the antisense strand comprise 2′-O-methyl modified nucleotides; and the even-numbered positions of the antisense strand comprise 2′flouro-modified nucleotides and unmodified deoxyribonucleotide.

[0078] In some embodiments, the moiety includes a negatively charged group attached at a 5′ end of the oligonucleotide. This may be referred to as a 5′-end group. In some embodiments, the negatively charged group is attached at a 5′ end of an antisense strand of an siRNA disclosed herein. The 5′-end group may be or include a 5′-end phosphorothioate, 5′-end phosphorodithioate, 5′-end vinylphosphonate (5′-VP), 5′-end methylphosphonate, 5′-end cyclopropyl phosphonate, or a 5′-deoxy-5′-C-malonyl. The 5′-end group may comprise 5′-VP. In some embodiments, the 5′-VP comprises a trans-vinylphosphate or cis-vinylphosphate. The 5′-end group may include an extra 5′ phosphate. A combination of 5′-end groups may be used.

[0079] In some embodiments, the oligonucleotide includes a negatively charged group. The negatively charged group may aid in cell or tissue penetration. The negatively charged group may be attached at a 5′ or 3′ end (e.g. a 5′ end) of the oligonucleotide. This may be referred to as an end group. The end group may be or include a phosphorothioate, phosphorodithioate, vinylphosphonate, methylphosphonate, cyclopropyl phosphonate, or a deoxy-C-malonyl. The end group may include an extra 5′ phosphate such as an extra 5′ phosphate. A combination of end groups may be used.

[0080] In some embodiments, the oligonucleotide includes a phosphate mimic. In some embodiments, the phosphate mimic comprises vinyl phosphonate. In some embodiments, the vinyl phosphonate comprises a trans-vinylphosphate. In some embodiments, the vinyl phosphonate comprises a cis-vinylphosphate. An example of a nucleotide that includes a vinyl phosphonate is shown below.

[chemical structure]

### 5′ vinylphosphonate 2′ O Methyl Uridine

[0081] In some embodiments, the vinyl phosphonate increases the stability of the oligonucleotide. In some embodiments, the vinyl phosphonate increases the accumulation of the oligonucleotide in tissues. In some embodiments, the vinyl phosphonate protects the oligonucleotide from an exonuclease or a phosphatase. In some embodiments, the vinyl phosphonate improves the binding affinity of the oligonucleotide with the siRNA processing machinery.

[0082] In some embodiments, the oligonucleotide includes 1 vinyl phosphonate. In some embodiments, the oligonucleotide includes 2 vinyl phosphonates. In some embodiments, the oligonucleotide includes 3 vinyl phosphonates. In some embodiments, the oligonucleotide includes 4 vinyl phosphonates. In some embodiments, the antisense strand of the oligonucleotide comprises a vinyl phosphonate at the 5′ end. In some embodiments, the antisense strand of the oligonucleotide comprises a vinyl phosphonate at the 3′ end. In some embodiments, the sense strand of the oligonucleotide comprises a vinyl phosphonate at the 5′ end. In some embodiments, the sense strand of the oligonucleotide comprises a vinyl phosphonate at the 3′ end.

### 1. Hydrophobic Moieties

[0083] In some embodiments, the composition comprises an oligonucleotide that inhibits the expression of HGFAC, wherein the oligonucleotide comprises a hydrophobic moiety. The hydrophobic moiety may be attached at a 3′ or 5′ terminus of the oligonucleotide. The hydrophobic moiety may include a lipid such as a fatty acid. The hydrophobic moiety may include a hydrocarbon. The hydrocarbon may be linear. The hydrocarbon may be non-linear. The hydrophobic moiety may include a lipid moiety or a cholesterol moiety, or a combination thereof.

[0084] In some embodiments, the composition comprises an oligonucleotide that inhibits the expression of HGFAC, wherein the oligonucleotide comprises a lipid attached at a 3′ or 5′ terminus of the oligonucleotide. In some embodiments, the lipid comprises cholesterol, myristoyl, palmitoyl, stearoyl, lithocholoyl, docosanoyl, docosahexaenoyl, myristyl, palmityl, stearyl, or α-tocopherol, or a combination thereof.

[0085] In some embodiments, the composition comprises an oligonucleotide that inhibits the expression of HGFAC, wherein the oligonucleotide comprises a hydrophobic ligand or moiety. In some embodiments, the hydrophobic ligand or moiety comprises cholesterol. In some embodiments, the hydrophobic ligand or moiety comprises a cholesterol derivative. In some embodiments, the hydrophobic ligand or moiety is attached at a 3′ terminus of the oligonucleotide. In some embodiments, the hydrophobic ligand or moiety s attached at a 5′ terminus of the oligonucleotide. In some embodiments, the composition comprises a sense strand, and the hydrophobic ligand or moiety is attached to the sense strand (e.g. attached to a 5′ end of the sense strand, or attached to a 3′ end of the sense strand). In some embodiments, the composition comprises an antisense strand, and the hydrophobic ligand or moiety is attached to the antisense strand (e.g. attached to a 5′ end of the antisense strand, or attached to a 3′ end of the antisense strand). In some embodiments, the composition comprises a hydrophobic ligand or moiety attached at a 3′ or 5′ terminus of the oligonucleotide.

[0086] In some embodiments, a hydrophobic moiety is attached to the oligonucleotide (e.g. a sense strand and/or an antisense strand of a siRNA). In some embodiments, a hydrophobic moiety is attached at a 3′ terminus of the oligonucleotide. In some embodiments, a hydrophobic moiety is attached at a 5′ terminus of the oligonucleotide. In some embodiments, the hydrophobic moiety comprises cholesterol. In some embodiments, the hydrophobic moiety includes a cyclohexanyl.

[0087] In some embodiments, the composition comprises an oligonucleotide that inhibits the expression of HGFAC, wherein the oligonucleotide comprises a lipid attached at a 3′ or 5′ terminus of the oligonucleotide. In some embodiments, a lipid is attached at a 3′ terminus of the oligonucleotide. In some embodiments, a lipid is attached at a 5′ terminus of the oligonucleotide. In some embodiments, the lipid comprises cholesterol, myristoyl, palmitoyl, stearoyl, lithocholoyl, docosanoyl, docosahexaenoyl, myristyl, palmityl, stearyl, or α-tocopherol, or a combination thereof. In some embodiments, the lipid comprises stearyl, lithocholyl, docosanyl, docosahexaenyl, or myristyl. In some embodiments, the lipid comprises cholesterol. In some embodiments, the lipid includes a sterol such as cholesterol. In some embodiments, the lipid comprises stearyl, t-butylphenol, n-butylphenol, octylphenol, dodecylphenol, phenyl n-dodecyl, octadecylbenzamide, hexadecylbenzamide, or octadecylcyclohexyl. In some embodiments, the lipid comprises phenyl para C12.

[0088] In some embodiments, the oligonucleotide comprises any aspect of the following structure:

[chemical structure]

In some embodiments, the oligonucleotide comprises any aspect of the following structure:

[chemical structure]

In some embodiments, the oligonucleotide comprises any aspect of the following structure:

[chemical structure]

In some embodiments, the oligonucleotide comprises any aspect of the following structure: The aspect included in the oligonucleotide may include the entire structure, or may include the lipid moiety, of any of the structures shown. In some embodiments, n is 1-3. In some embodiments, n is 1. In some embodiments, n is 2. In some embodiments, n is 3. In some embodiments, R is an alkyl group. In some embodiments, the alkyl group contains 1, 2, 3, 4, 5, 6, 7, 8, 9, 10, 11, 12, 13, 14, 15, 16, 17, 18, 19, or 20 carbons. In some embodiments, the alkyl group contains 4, 5, 6, 7, 8, 9, 10, 11, 12, 13, 14, 15, 16, 17, or 18 carbons, or a range defined by any two of the aforementioned numbers of carbons. In some embodiments, the alkyl group contains 4-18 carbons. In some embodiments, the lipid moiety comprises an alcohol or ether.

[0089] In some embodiments, the lipid includes a fatty acid. In some embodiments, the lipid comprises a lipid depicted in Table 1B. The example lipid moieties in Table 1B are shown attached at a 5′ end of an oligonucleotide, in which the 5′ terminal phosphate of the oligonucleotide is shown with the lipid moiety. In some embodiments, a lipid moiety in Table 1B may be attached at a different point of attachment than shown. For example, the point of attachment of any of the lipid moieties in the table may be at a 3′ oligonucleotide end. In some embodiments, the lipid is used for targeting the oligonucleotide to a non-hepatic cell or tissue.

TABLE 1B
Hydrophobic moiety examples

| Hydrophobic | Hydrophobic | |
|---|---|---|
| Moiety Description | Moiety Name | Example Conjugation |
| stearyl | ETL3 | [chemical structure] |
| t-butylphenyl | ETL7 | [chemical structure] |
| n-butylphenyl | ETL8 | [chemical structure] |
| octylphenyl | ETL9 | [chemical structure] |
| dodecylphenyl | ETL10 | [chemical structure] |
| phenyl n-dodecyl | ETL12 | [chemical structure] |
| octadecylbenzamide | ETL13 | [chemical structure] |
| hexadecylbenzamide | ETL15 | [chemical structure] |
| octadecylcyclohexyl | ETL16 | [chemical structure] |

[0090] In some embodiments, the lipid or lipid moiety includes 16 to 18 carbons. In some embodiments, the lipid includes 16 carbons. In some embodiments, the lipid includes 17 carbons. In some embodiments, the lipid includes 18 carbons. In some embodiments, the lipid moiety includes 16 carbons. In some embodiments, the lipid moiety includes 17 carbons. In some embodiments, the lipid moiety includes 18 carbons.

[0091] The hydrophobic moiety may include a linker that comprises a carbocycle. The carbocycle may be six-membered. Some examples of a carbocycle include phenyl or cyclohexyl. The linker may include a phenyl. The linker may include a cyclohexyl. The lipid may be attached to the carbocycle, which may in turn be attached at a phosphate (e.g. 5′ or 3′ phosphate) of the oligonucleotide. In some embodiments, the lipid or hydrocarbon, and the end of the sense are connected to the phenyl or cyclohexyl linker in the 1,4; 1,3; or 1,2 substitution pattern (e.g. the para, meta, or ortho phenyl configuration). In some embodiments, the lipid or hydrocarbon, and the end of the sense are connected to the phenyl or cyclohexyl linker in the 1,4 substitution pattern (e.g. the para phenyl configuration). The lipid may be attached to the carbocycle in the 1,4 substitution pattern relative to the oligonucleotide. The lipid may be attached to the carbocycle in the 1,3 substitution pattern relative to the oligonucleotide. The lipid may be attached to the carbocycle in the 1,2 substitution pattern relative to the oligonucleotide. The lipid may be attached to the carbocycle in the ortho orientation relative to the oligonucleotide. The lipid may be attached to the carbocycle in the para orientation relative to the oligonucleotide. The lipid may be attached to the carbocycle in the meta orientation relative to the oligonucleotide.

[0092] The lipid moiety may comprise or consist of the following structure

[chemical structure]

In some embodiments, the lipid moiety comprises or consists of the following structure:

[chemical structure]

In some embodiments, the lipid moiety comprises the following structure:

[chemical structure]

In some embodiments, the lipid moiety comprises or consist of the following structure:

[chemical structure]

In some embodiments, the dotted line indicates a covalent connection. The covalent connection may between an end of the sense or antisense strand. For example, the connection may be to the 5′ end of the sense strand. In some embodiments, n is 0-3. In some embodiments, n is 1-3. In some embodiments, n is 0. In some embodiments, n is 1. In some embodiments, n is 2. In some embodiments, n is 3. In some embodiments, n is 4. In some embodiments, n is 5. In some embodiments, n is 1, 2, 3, 4, 5, 6, 7, 8, 9, or 10. In some embodiments, R is an alkyl group. In some embodiments, the alkyl group contains 1, 2, 3, 4, 5, 6, 7, 8, 9, 10, 11, 12, 13, 14, 15, 16, 17, 18, 19, or 20 carbons. In some embodiments, the alkyl group contains 4, 5, 6, 7, 8, 9, 10, 11, 12, 13, 14, 15, 16, 17, or 18 carbons, or a range defined by any two of the aforementioned numbers of carbons. In some embodiments, R comprises or consists of an alkyl group containing 4-18 carbons.

[0093] The lipid moiety may be attached at a 5′ end of the oligonucleotide. The 5′ end may have one phosphate linking the lipid moiety to a 5′ carbon of a sugar of the oligonucleotide. The 5′ end may have two phosphates linking the lipid moiety to a 5′ carbon of a sugar of the oligonucleotide. The 5′ end may have three phosphates linking the lipid moiety to a 5′ carbon of a sugar of the oligonucleotide. The 5′ end may have one phosphate connected to the 5′ carbon of a sugar of the oligonucleotide, where the one phosphate is connected to the lipid moiety. The 5′ end may have two phosphates connected to the 5′ carbon of a sugar of the oligonucleotide, where the one of the two phosphates is connected to the lipid moiety. The 5′ end may have three phosphates connected to the 5′ carbon of a sugar of the oligonucleotide, where the one of the three phosphates is connected to the lipid moiety. The sugar may include a ribose. The sugar may include a deoxyribose. The sugar may be modified a such as a 2′ modified sugar (e.g. a 2′ O-methyl or 2′ fluoro ribose). A phosphate of the 5′ end may include a modification such as a sulfur in place of an oxygen. Two phosphates of the 5′ end may include a modification such as a sulfur in place of an oxygen. Three phosphates of the 5′ end may include a modification such as a sulfur in place of an oxygen.

[0094] In some embodiments, the oligonucleotide includes 1 lipid moiety. In some embodiments, the oligonucleotide includes 2 lipid moieties. In some embodiments, the oligonucleotide includes 3 lipid moieties. In some embodiments, the oligonucleotide includes 4 lipid moieties.

[0095] Some embodiments relate to a method of making an oligonucleotide comprising a hydrophobic conjugate. A strategy for making hydrophobic conjugates may include use of a phosphoramidite reagent based upon a 6-membered ring alcohol such as a phenol or cyclohexanol. The phosphoramidite may be reacted to a nucleotide to connect the nucleotide to the hydrophobic moiety, and thereby produce the hydrophobic conjugate. Some examples of phosphoramidite reagents that may be used to produce a hydrophobic conjugate are provided as follows:

[chemical structure]

In some embodiments, n is 1-3. In some embodiments, n is 1. In some embodiments, n is 2. In some embodiments, n is 3. In some embodiments, R is an alkyl group. In some embodiments, the alkyl group contains 1, 2, 3, 4, 5, 6, 7, 8, 9, 10, 11, 12, 13, 14, 15, 16, 17, 18, 19, or 20 carbons. In some embodiments, the alkyl group contains 4, 5, 6, 7, 8, 9, 10, 11, 12, 13, 14, 15, 16, 17, or 18 carbons, or a range defined by any two of the aforementioned numbers of carbons. In some embodiments, R comprises or consists of an alkyl group containing 4-18 carbons. Any one of the phosphoramidite reagents may be reacted to a 5′ end of an oligonucleotide to produce an oligonucleotide comprising a hydrophobic moiety. In some embodiments, the phosphoramidite reagents is reacted to a 5′ end of a sense strand of an siRNA. The sense strand may then be hybridized to an antisense strand to form a duplex. The hybridization may be performed by incubating the sense and antisense strands in solution at a given temperature. The temperature may be gradually reduced. The temperature may comprise or include a temperature comprising an annealing temperature for the sense and antisense strands. The temperature may be below or include a temperature below the annealing temperature for the sense and antisense strands. The temperature may be below a melting temperature of the sense and antisense strands.

[0096] The lipid may be attached to the oligonucleotide by a linker. The linker may include a polyethyleneglycol (e.g. tetraethyleneglycol).

[0097] The modifications described herein may be useful for delivery to a cell or tissue, for example, extrahepatic delivery or targeting of an oligonucleotide composition. The modifications described herein may be useful for targeting an oligonucleotide composition to a cell or tissue.

### 2. Sugar Moieties

[0098] In some embodiments, the composition comprises an oligonucleotide that inhibits the expression of HGFAC, wherein the oligonucleotide comprises a sugar moiety. The sugar moiety may include an N-acetyl galactose moiety (e.g. an N-acetylgalactosamine (GalNAc) moiety), an N-acetyl glucose moiety (e.g. an N-acetylglucosamine (GlcNAc) moiety), a fucose moiety, or a mannose moiety. The sugar moiety may include 1, 2, 3, or more sugar molecules. The sugar moiety may be attached at a 3′ or 5′ terminus of the oligonucleotide. The sugar moiety may include an N-acetyl galactose moiety. The sugar moiety may include an N-acetylgalactosamine (GalNAc) moiety. The sugar moiety may include an N-acetyl glucose moiety. The sugar moiety may include N-acetylglucosamine (GlcNAc) moiety. The sugar moiety may include a fucose moiety. The sugar moiety may include a mannose moiety. N-acetyl glucose, GlcNAc, fucose, or mannose may be useful for targeting macrophages when they target or bind a mannose receptor such as CD206. The sugar moiety may be useful for binding or targeting an asialoglycoprotein receptor such as an asialoglycoprotein receptor of a hepatocyte. The GalNAc moiety may bind to an asialoglycoprotein receptor. The GalNAc moiety may target a hepatocyte.

[0099] In some embodiments, the composition comprises an oligonucleotide that inhibits the expression of HGFAC, wherein the oligonucleotide comprises an N-acetylgalactosamine (GalNAc) moiety. GalNAc may be useful for hepatocyte targeting. The GalNAc moiety may include a bivalent or trivalent branched linker. The oligo may be attached to 1, 2 or 3 GalNAcs through a bivalent or trivalent branched linker.

[0100] The GalNAc moiety may include 1, 2, 3, or more GalNAc molecules. The GalNAc moiety may be attached at a 3′ or 5′ terminus of the oligonucleotide.

[0101] In some embodiments, the composition comprises an oligonucleotide that inhibits the expression of HGFAC, wherein the oligonucleotide comprises an N-acetylgalactosamine (GalNAc) ligand for hepatocyte targeting. In some embodiments, the composition comprises GalNAc. In some embodiments, the composition comprises a GalNAc derivative. In some embodiments, the GalNAc ligand is attached at a 3′ terminus of the oligonucleotide. In some embodiments, the GalNAc ligand is attached at a 5′ terminus of the oligonucleotide. In some embodiments, the composition comprises a sense strand, and the GalNAc ligand is attached to the sense strand (e.g. attached to a 5′ end of the sense strand, or attached to a 3′ end of the sense strand). In some embodiments, the composition comprises an antisense strand, and the GalNAc ligand is attached to the antisense strand (e.g. attached to a 5′ end of the antisense strand, or attached to a 3′ end of the antisense strand). In some embodiments, the composition comprises a GalNAc ligand attached at a 3′ or 5′ terminus of the oligonucleotide.

[0102] Disclosed herein, in some embodiments, are compositions comprising an oligonucleotide that inhibits the expression of HGFAC, wherein the oligonucleotide comprises a GalNAc moiety. The GalNAc moiety may be included in any formula, structure, or GalNAc moiety shown below. In some embodiments, described herein is a compound (e.g. oligonucleotide) represented by Formula (I) or (II):

[chemical structure]

[0103] or a salt thereof, wherein
[0104] J is an oligonucleotide;
[0105] each w is independently selected from any value from 1 to 20;
[0106] each v is independently selected from any value from 1 to 20;
[0107] n is selected from any value from 1 to 20;
[0108] m is selected from any value from 1 to 20;
[0109] z is selected from any value from 1 to 3, wherein
   [0110] if z is 3, Y is C
   [0111] if z is 2, Y is CR⁶, or
   [0112] if z is 1, Y is C(R⁶)₂;
[0113] Q is selected from:
   [0114] C₃₋₁₀ carbocycle optionally substituted with one or more substituents independently selected from halogen, —CN, —NO₂, —OR⁷, —SR⁷, —N(R⁷)₂, —C(O)R⁷, —C(O)N(R⁷)₂, —N(R⁷)C(O)R⁷, —N(R⁷)C(O)N(R⁷)₂, —OC(O)N(R⁷)₂, —N(R⁷)C(O)OR⁷, —C(O)OR⁷, —OC(O)R⁷, —S(O)R⁷, and C₁₋₆ alkyl, wherein the C₁₋₆ alkyl, is optionally substituted with one or more substituents independently selected from halogen, —CN, —OH, —SH, —NO₂, and —NH₂;
[0115] R¹ is a linker selected from:
   [0116] —O—, —S—, —N(R⁷)—, —C(O)—, —C(O)N(R⁷)—, —N(R⁷)C(O)—, —N(R⁷)C(O)N(R⁷)—, —OC(O)N(R⁷)—, —N(R⁷)C(O)O—, —C(O)O—, —OC(O)—, —S(O)—, —S(O)₂—, —OS(O)₂—, —OP(O)(OR⁷)O—, —SP(O)(OR⁷)O—, —OP(S)(OR⁷)O—, —OP(O)(SR⁷)O—, —OP(O)(OR⁷)S—, —OP(O)(O—)O—, —SP(O)(O—)O—, —OP(S)(O—)O—, —OP(O)(S—)O—, —OP(O)(O—)S—, —OP(O)(OR⁷)NR⁷—, —OP(O)(N(R⁷)₂)NR⁷—, —OP(OR⁷)O—, —OP(N(R⁷)₂)O—, —OP(OR⁷)N(R⁷)—, and —OPN(R⁷)₂NR⁷—;
[0117] each R² is independently selected from:
   [0118] C₁₋₆ alkyl optionally substituted with one or more substituents independently selected from halogen, —OR⁷, —SR⁷, —N(R⁷)₂, —C(O)R⁷, —C(O)N(R⁷)₂, —N(R⁷)C(O)R⁷, —N(R⁷)C(O)N(R⁷)₂, —OC(O)N(R⁷)₂, —N(R⁷)C(O)OR⁷, —C(O)OR⁷, —OC(O)R⁷, and —S(O)R⁷;
[0119] R³ and R⁴ are each independently selected from:
   [0120] —OR⁷, —SR⁷, —N(R⁷)₂, —C(O)R⁷, —C(O)N(R⁷)₂, —N(R⁷)C(O)R⁷, —N(R⁷)C(O)N(R⁷)₂, —OC(O)N(R⁷)₂, —N(R⁷)C(O)OR⁷, —C(O)OR⁷, —OC(O)R⁷, and —S(O)R⁷;
[0121] each R⁵ is independently selected from:
   [0122] —OC(O)R⁷, —OC(O)N(R⁷)₂, —N(R⁷)C(O)R⁷, —N(R⁷)C(O)N(R⁷)₂, —N(R⁷)C(O)OR⁷, —C(O)R⁷, —C(O)OR⁷, and —C(O)N(R⁷)₂;
[0123] each R⁶ is independently selected from:
   [0124] hydrogen;
   [0125] halogen, —CN, —NO₂, —OR⁷, —SR⁷, —N(R⁷)₂, —C(O)R⁷, —C(O)N(R⁷)₂, —N(R⁷)C(O)R⁷, —N(R⁷)C(O)N(R⁷)₂, —OC(O)N(R⁷)₂, —N(R⁷)C(O)OR⁷, —C(O)OR⁷, —OC(O)R⁷, and —S(O)R⁷; and
   [0126] C₁₋₆ alkyl optionally substituted with one or more substituents independently selected from halogen, —CN, —NO₂, —OR⁷, —SR⁷, —N(R⁷)₂, —C(O)R⁷, —C(O)N(R⁷)₂, —N(R⁷)C(O)R⁷, —N(R⁷)C(O)N(R⁷)₂, —OC(O)N(R⁷)₂, —N(R⁷)C(O)OR⁷, —C(O)OR⁷, —OC(O)R⁷, and —S(O)R⁷; each R⁷ is independently selected from:
   [0127] hydrogen;
   [0128] C₁₋₆ alkyl, C₂₋₆ alkenyl, and C₂₋₆ alkynyl, each of which is optionally substituted with one or more substituents independently selected from halogen, —CN, —OH, —SH, —NO₂, —NH₂, ═O, ═S, —O—C₁₋₆ alkyl, —S—C₁₋₆ alkyl, —N(C₁₋₆ alkyl)₂, —NH(C₁₋₆ alkyl), C₃₋₁₀ carbocycle, and 3- to 10-membered heterocycle; and
   [0129] C₃₋₁₀ carbocycle, and 3- to 10-membered heterocycle, each of which is optionally substituted with one or more substituents independently selected from halogen, —CN, —OH, —SH, —NO₂, —NH₂, ═O, ═S, —O—C₁₋₆ alkyl, —S—C₁₋₆ alkyl, —N(C₁₋₆ alkyl)₂, —NH(C₁₋₆ alkyl), C₁₋₆ alkyl, C₂₋₆ alkenyl, C₂₋₆ alkynyl, C₃₋₁₀ carbocycle, 3- to 10-membered heterocycle, and C₁₋₆ haloalkyl.
      In some embodiments, each w is independently selected from any value from 1 to 10. In some embodiments, each w is independently selected from any value from 1 to 5. In some embodiments, each w is 1. In some embodiments, each v is independently selected from any value from 1 to 10. In some embodiments, each v is independently selected from any value from 1 to 5. In some embodiments, each v is 1. In some embodiments, n is selected from any value from 1 to 10. In some embodiments, n is selected from any value from 1 to 5. In some embodiments, n is 2. In some embodiments, m is selected from any value from 1 to 10. In some embodiments, m is selected from any value from 1 to 5. In some embodiments, m is selected from 1 and 2. In some embodiments, z is 3 and Y is C. In some embodiments, Q is selected from C₅₆ carbocycle optionally substituted with one or more substituents independently selected from halogen, —CN, —NO₂, —OR⁷, —SR⁷, —N(R⁷)₂, —C(O)R⁷, —C(O)N(R⁷)₂, —N(R⁷)C(O)R⁷, —N(R⁷)C(O)N(R⁷)₂, —OC(O)N(R⁷)₂, —N(R⁷)C(O)OR⁷, —C(O)OR⁷, —OC(O)R⁷, and —S(O)R⁷. In some embodiments, Q is selected from C₅₆ carbocycle optionally substituted with one or more substituents independently selected from halogen, —CN, —OH, —SH, —NO₂, and —NH₂. In some embodiments, Q is selected from phenyl and cyclohexyl, each of which is optionally substituted with one or more substituents independently selected from halogen, —CN, —OH, —SH, —NO₂, and —NH₂. In some embodiments, Q is selected from phenyl. In some embodiments, Q is selected from cyclohexyl. In some embodiments, R¹ is selected from —OP(O)(OR⁷)O—, —SP(O)(OR⁷)O—, —OP(S)(OR⁷)O—, —OP(O)(SR⁷)O—, —OP(O)(OR⁷)S—, —OP(O)(O—)O—, —SP(O)(O—)O—, —OP(S)(O—)O—, —OP(O)(S—)O—, —OP(O)(O—)S—, —OP(O)(OR⁷)NR⁷—, —OP(O)(N(R⁷)₂)NR⁷—, —OP(OR⁷)O—, —OP(N(R⁷)₂)O—, —OP(OR⁷)N(R⁷)—, and —OPN(R⁷)₂—NR⁷. In some embodiments, R¹ is selected from —OP(O)(OR⁷)O—, —SP(O)(OR⁷)O—, —OP(S)(OR⁷)O—, —OP(O)(SR⁷)O—, —OP(O)(OR⁷)S—, —OP(O)(O—)O—, —SP(O)(O—)O—, —OP(S)(O—)O—, —OP(O)(S—)O—, —OP(O)(0-)S—, and —OP(OR⁷)O—. In some embodiments, R¹ is selected from —OP(O)(OR⁷)O—, —OP(S)(OR⁷)O—, —OP(O)(O—)O—, —OP(S)(O—)O—, —OP(O)(S—)O—, and —OP(OR⁷)O—. In some embodiments, R¹ is selected from —OP(O)(OR⁷)O— and —OP(OR⁷)O—. In some embodiments, R² is selected from C₁₋₃ alkyl substituted with one or more substituents independently selected from halogen, —OR⁷, —OC(O)R⁷, —SR⁷, —N(R⁷)₂, —C(O)R⁷, and —S(O)R⁷. In some embodiments, R² is selected from C₁₋₃ alkyl substituted with one or more substituents independently selected from —OR⁷, —OC(O)R⁷, —SR⁷, and —N(R⁷)₂. In some embodiments, R² is selected from C₁₋₃ alkyl substituted with one or more substituents independently selected from —OR⁷ and —OC(O)R⁷. In some embodiments, R³ is selected from halogen, —OR⁷, —SR⁷, —N(R⁷)₂, —C(O)R⁷, —OC(O)R⁷, and —S(O)R⁷. In some embodiments, R³ is selected from —OR⁷—SR⁷, —OC(O)R⁷, and —N(R⁷)₂. In some embodiments, R³ is selected from —OR⁷— and —OC(O)R⁷. In some embodiments, R⁴ is selected from halogen, —OR⁷, —SR⁷, —N(R⁷)₂, —C(O)R⁷, —OC(O)R⁷, and —S(O)R⁷. In some embodiments, R⁴ is selected from —OR⁷—SR⁷, —OC(O)R⁷, and —N(R⁷)₂. In some embodiments, R⁴ is selected from —OR⁷— and —OC(O)R⁷. In some embodiments, R⁵ is selected from —OC(O)R⁷, —OC(O)N(R⁷)₂, —N(R⁷)C(O)R⁷, —N(R⁷)C(O)N(R⁷)₂, and —N(R⁷)C(O)OR⁷. In some embodiments, R⁵ is selected from —OC(O)R⁷ and —N(R⁷)C(O)R⁷. In some embodiments, each R⁷ is independently selected from: hydrogen; and C₁₋₆ alkyl optionally substituted with one or more substituents independently selected from halogen, —CN, —OH, —SH, —NO₂, —NH₂, ═O, ═S, —O—C₁₋₆ alkyl, —S—C₁₋₆ alkyl, —N(C₁₋₆ alkyl)₂, —NH(C₁₋₆ alkyl), C₃₋₁₀ carbocycle, or 3- to 10-membered heterocycle. In some embodiments, each R⁷ is independently selected from C₁₋₆ alkyl optionally substituted with one or more substituents independently selected from halogen, —CN, —OH, —SH, —NO₂, —NH₂, ═O, ═S, —O—C₁₋₆ alkyl, —S—C₁₋₆ alkyl, —N(C₁₋₆ alkyl)₂, and —NH(C₁₋₆ alkyl). In some embodiments, each R⁷ is independently selected from C₁₋₆ alkyl optionally substituted with one or more substituents independently selected from halogen, —CN, —OH, and —SH. In some embodiments, w is 1; v is 1; n is 2; m is 1 or 2; z is 3 and Y is C; Q is phenyl or cyclohexyl, each of which is optionally substituted with one or more substituents independently selected from halogen, —CN, —OH, —SH, —NO₂, —NH₂, and C₁₋₃ alkyl; R¹ is selected from —OP(O)(OR⁷)O—, —OP(S)(OR⁷)O—, —OP(O)(O—)O—, —OP(S)(O—)O—, —OP(O)(S—)O—, and —OP(OR⁷)O—; R² is C₁ alkyl substituted with —OH or —OC(O)CH₃;
[0130] R³ is —OH or —OC(O)CH₃; R⁴ is —OH or —OC(O)CH₃; and R⁵ is —NH(O)CH₃. In some embodiments, the compound comprises:

[chemical structure]

[chemical structure]

[chemical structure]

[chemical structure]

[chemical structure]

[chemical structure]

[chemical structure]

[chemical structure]

[chemical structure]

[chemical structure]

[chemical structure]

[chemical structure]

[chemical structure]

[chemical structure]

[chemical structure]

[chemical structure]

In some embodiments, the oligonucleotide (J) is attached at a 5′ end or a 3′ end of the oligonucleotide. In some embodiments, the oligonucleotide comprises DNA. In some embodiments, the oligonucleotide comprises RNA. In some embodiments, the oligonucleotide comprises one or more modified internucleoside linkages. In some embodiments, the one or more modified internucleoside linkages comprise alkylphosphonate, phosphorothioate, methylphosphonate, phosphorodithioate, alkylphosphonothioate, phosphoramidate, carbamate, carbonate, phosphate triester, acetamidate, or carboxymethyl ester, or a combination thereof. In some embodiments, the oligonucleotide comprises 1, 2, 3, 4, 5, 6, 7, 8, 9, 10, 11, 12, 13, 14, 15, 16, 17, 18, 19, or 20 modified internucleoside linkages. In some embodiments, the compound binds to an asialoglycoprotein receptor. In some embodiments, the compound targets a hepatocyte.

[0131] Some embodiments include the following, where J is the oligonucleotide:

[chemical structure]

J may include one or more additional phosphates, or one or more phosphorothioates linking to the oligonucleotide. J may include one or more additional phosphates linking to the oligonucleotide. J may include one or more phosphorothioates linking to the oligonucleotide.

[0132] Some embodiments include the following, where J is the oligonucleotide:

[chemical structure]

J may include one or more additional phosphates, or one or more phosphorothioates linking to the oligonucleotide. J may include one or more additional phosphates linking to the oligonucleotide. J may include one or more phosphorothioates linking to the oligonucleotide.

[0133] Some embodiments include the following, where J is the oligonucleotide:

[chemical structure]

J may include one or more phosphates or phosphorothioates linking to the oligonucleotide. J may include one or more phosphates linking to the oligonucleotide. J may include a phosphate linking to the oligonucleotide. J may include one or more phosphorothioates linking to the oligonucleotide. J may include a phosphorothioate linking to the oligonucleotide.

[0134] Some embodiments include the following, where J is the oligonucleotide:

[chemical structure]

The structure in this compound attached to the oligonucleotide (J) may be referred to as “ETL17,” and is an example of a GalNAc moiety. J may include one or more phosphates or phosphorothioates linking to the oligonucleotide. J may include one or more phosphates linking to the oligonucleotide. J may include a phosphate linking to the oligonucleotide. J may include one or more phosphorothioates linking to the oligonucleotide. J may include a phosphorothioate linking to the oligonucleotide.

[0135] Some embodiments include the following, where the phosphate or “5′” indicates a connection to the oligonucleotide:

[chemical structure]

[0136] Some embodiments include the following, where the phosphate or “5′” indicates a connection to the oligonucleotide:

[chemical structure]

[0137] Some embodiments include the following, where J is the oligonucleotide:

[chemical structure]

include one or more phosphates or phosphorothioates linking to the oligonucleotide. J may include one or more phosphates linking to the oligonucleotide. J may include a phosphate linking to the oligonucleotide. J may include one or more phosphorothioates linking to the oligonucleotide. J may include a phosphorothioate linking to the oligonucleotide.

[0138] Some embodiments include the following, where J is the oligonucleotide.

[chemical structure]

The structure in this compound attached to the oligonucleotide (J) may be referred to as “ETL1,” and is an example of a GalNAc moiety. J may include one or more phosphates or phosphorothioates linking to the oligonucleotide. J may include one or more phosphates linking to the oligonucleotide. J may include a phosphate linking to the oligonucleotide. J may include one or more phosphorothioates linking to the oligonucleotide. J may include a phosphorothioate linking to the oligonucleotide

[0139] Some embodiments include the following, where J is the oligonucleotide:

[chemical structure]

J may include one or more additional phosphates, or one or more phosphorothioates linking to the oligonucleotide. J may include one or more additional phosphates linking to the oligonucleotide. J may include one or more phosphorothioates linking to the oligonucleotide.

[0140] Some embodiments include the following, where J is the oligonucleotide:

[chemical structure]

J may include one or more additional phosphates, or one or more phosphorothioates linking to the oligonucleotide. J may include one or more additional phosphates linking to the oligonucleotide. J may include one or more phosphorothioates linking to the oligonucleotide.

[0141] Some embodiments include the following, where J is the oligonucleotide:

[chemical structure]

J may include one or more phosphates or phosphorothioates linking to the oligonucleotide. J may include one or more phosphates linking to the oligonucleotide. J may include a phosphate linking to the oligonucleotide. J may include one or more phosphorothioates linking to the oligonucleotide. J may include a phosphorothioate linking to the oligonucleotide.

[0142] Some embodiments include the following, where J is the oligonucleotide:

[chemical structure]

The structure in this compound attached to the oligonucleotide (J) may be referred to as “ETL17,” and is an example of a GalNAc moiety. J may include one or more phosphates or phosphorothioates linking to the oligonucleotide. J may include one or more phosphates linking to the oligonucleotide. J may include a phosphate linking to the oligonucleotide. J may include one or more phosphorothioates linking to the oligonucleotide. J may include a phosphorothioate linking to the oligonucleotide.
3. Modified siRNAs

[0143] In some embodiments, the composition comprises an oligonucleotide that inhibits the expression of HGFAC, wherein the oligonucleotide comprises an siRNA comprising a sense strand and an antisense strand, wherein the sense strand comprises modification pattern 1S: 5′-NfsnsNfnNfnNfNfNfnNfnNfnNfnNfnNfsnsn-3′, wherein “Nf” is a 2′ fluoro-modified nucleoside, “n” is a 2′ O-methyl modified nucleoside, and “s” is a phosphorothioate linkage. In some embodiments, the sense strand comprises modification pattern 2S: 5′-nsnsnnNfnNfNfNfnnnnnnnnnnsnsn-3′, wherein “Nf” is a 2′ fluoro-modified nucleoside, “n” is a 2′ O-methyl modified nucleoside, and “s” is a phosphorothioate linkage. In some embodiments, the sense strand comprises modification pattern 3S: 5′-nsnsnnNfnNfnNfnnnnnnnnnnsnsn-3′, wherein “Nf” is a 2′ fluoro-modified nucleoside, “n” is a 2′ O-methyl modified nucleoside, and “s” is a phosphorothioate linkage. In some embodiments, the sense strand comprises modification pattern 4S: 5′-NfsnsNfnNfnNfNfNfnNfnNfnNfnNfnNfsnsnN-moiety-3′, wherein “Nf” is a 2′ fluoro-modified nucleoside, “n” is a 2′ O-methyl modified nucleoside, “s” is a phosphorothioate linkage, and N comprises one or more nucleosides. In some embodiments, the sense strand comprises modification pattern 5S: 5′-nsnsnnNfnNfNfNfnnnnnnnnnnsnsnN-moiety-3′, wherein “Nf” is a 2′ fluoro-modified nucleoside, “n” is a 2′ O-methyl modified nucleoside, “s” is a phosphorothioate linkage, and N comprises one or more nucleosides. In some embodiments, the moiety in modification pattern 4S or 5S is a sugar moiety. In some embodiments, the sense strand comprises modification pattern 6S: 5′-NfsnsNfnNfnNfnNfnNfnNfnNfnNfnNfsnsn-3′, wherein “Nf” is a 2′ fluoro-modified nucleoside, “n” is a 2′ O-methyl modified nucleoside, and “s” is a phosphorothioate linkage. In some embodiments, the sense strand comprises modification pattern 7S: 5′-nsnsnnNfNfNfNfNfnnnnnnnnnnsnsn-3′, wherein “Nf” is a 2′ fluoro-modified nucleoside, “n” is a 2′ O-methyl modified nucleoside, and “s” is a phosphorothioate linkage. In some embodiments, the sense strand comprises modification pattern 8S: 5′-nsnsnnnNfNfNfNfnnnnnnnnnnsnsn-3′, wherein “Nf” is a 2′ fluoro-modified nucleoside, “n” is a 2′ O-methyl modified nucleoside, and “s” is a phosphorothioate linkage. In some embodiments, the sense strand comprises modification pattern 9S: 5′-nsnsnnnnNfNfNfNfnnnnnnnnnsnsn-3′, wherein “Nf” is a 2′ fluoro-modified nucleoside, “n” is a 2′ O-methyl modified nucleoside, and “s” is a phosphorothioate linkage. In some embodiments, the sense strand comprises modification pattern 10S: 5′-nnnnnNfNfnNfnnnnnnnnnnsnsn-3′, wherein “Nf” is a 2′ fluoro-modified nucleoside, “n” is a 2′ O-methyl modified nucleoside, and “s” is a phosphorothioate linkage. In some embodiments, the sense strand comprises modification pattern 11S: 5′-nnnnnnnnNfNfnnnnnnnnnsnsn-3′, wherein “Nf” is a 2′ fluoro-modified nucleoside, “n” is a 2′ O-methyl modified nucleoside, and “s” is a phosphorothioate linkage. In some embodiments, the sense strand comprises modification pattern 12S: 5′-nnnnNfnNfNfdNNfnnnnnnnnnsnsn-3′, wherein “Nf” is a 2′ fluoro-modified nucleoside, “n” is a 2′ O-methyl modified nucleoside, “dN” is a 2′ deoxy nucleoside, and “s” is a phosphorothioate linkage. In some embodiments, the sense strand comprises modification pattern 13S: 5′-nnnnnnnNfNfnNfnnnnnnnnsnsn-3′, wherein “Nf” is a 2′ fluoro-modified nucleoside, “n” is a 2′ O-methyl modified nucleoside, and “s” is a phosphorothioate linkage. In some embodiments, the sense strand comprises modification pattern 14S: 5′-nnnnnNfnnNfnNfhnnnnnnnsnsn-3′, wherein “Nf” is a 2′ fluoro-modified nucleoside, “n” is a 2′ O-methyl modified nucleoside, and “s” is a phosphorothioate linkage. In some embodiments, the sense strand comprises modification pattern 15S: 5′-nnnnnNfnNfNfnnnnnnnnnnsnsn-3′, wherein “Nf” is a 2′ fluoro-modified nucleoside, “n” is a 2′ O-methyl modified nucleoside, and “s” is a phosphorothioate linkage. In some embodiments, the sense strand comprises modification pattern 16S: 5′-nnnnnNfnNfNfnNfhnnnnnnnsnsn-3′, wherein “Nf” is a 2′ fluoro-modified nucleoside, “n” is a 2′ O-methyl modified nucleoside, and “s” is a phosphorothioate linkage. In some embodiments, the sense strand comprises modification pattern 17S: 5′-nnnnnnNfnNfNfnnnnnnnnnsnsn-3′, wherein “Nf” is a 2′ fluoro-modified nucleoside, “n” is a 2′ O-methyl modified nucleoside, and “s” is a phosphorothioate linkage. In some embodiments, the sense strand comprises modification pattern 18S: 5′-nnnnNfnNfnNfhnnnnnnnnnsnsn-3′, wherein “Nf” is a 2′ fluoro-modified nucleoside, “n” is a 2′ O-methyl modified nucleoside, and “s” is a phosphorothioate linkage. In some embodiments, the sense strand comprises modification pattern 19S: 5′-nnnnNfNfnnNfnnnnnnnnnnsnsn-3′, wherein “Nf” is a 2′ fluoro-modified nucleoside, “n” is a 2′ O-methyl modified nucleoside, and “s” is a phosphorothioate linkage. In some embodiments, the sense strand comprises modification pattern 20S: 5′-nnnnNfnnnNfnNfhnnnnnnnsnsn-3′, wherein “Nf” is a 2′ fluoro-modified nucleoside, “n” is a 2′ O-methyl modified nucleoside, and “s” is a phosphorothioate linkage. In some embodiments, the sense strand comprises modification pattern 21S: 5′-nnnnNfNfnnNfnNfnnnnnnnnsnsn-3′, wherein “Nf” is a 2′ fluoro-modified nucleoside, “n” is a 2′ O-methyl modified nucleoside, and “s” is a phosphorothioate linkage. In some embodiments, the sense strand comprises modification pattern 22S: 5′-nnnnnnNfnNfnNfhnnnnnnnsnsn-3′, wherein “Nf” is a 2′ fluoro-modified nucleoside, “n” is a 2′ O-methyl modified nucleoside, and “s” is a phosphorothioate linkage. In some embodiments, the sense strand comprises modification pattern 23S: 5′-nnnnnNfNfnNfnNfnnnnnnnnsnsn-3′, wherein “Nf” is a 2′ fluoro-modified nucleoside, “n” is a 2′ O-methyl modified nucleoside, and “s” is a phosphorothioate linkage. In some embodiments, the sense strand comprises modification pattern 24S: 5′-nnnnnNfNfNfNfnnnnnnnnnnsnsn-3′, wherein “Nf” is a 2′ fluoro-modified nucleoside, “n” is a 2′ O-methyl modified nucleoside, and “s” is a phosphorothioate linkage. In some embodiments, the sense strand comprises modification pattern 25S: 5′-nnnnnNfNfNfNfnNfnnnnnnnnsnsn-3′, wherein “Nf” is a 2′ fluoro-modified nucleoside, “n” is a 2′ O-methyl modified nucleoside, and “s” is a phosphorothioate linkage. In some embodiments, the sense strand comprises modification pattern 26S: 5′-nnnnNfnnNfNfnnnnnnnnnnsnsn-3′, wherein “Nf” is a 2′ fluoro-modified nucleoside, “n” is a 2′ O-methyl modified nucleoside, and “s” is a phosphorothioate linkage. In some embodiments, the sense strand comprises modification pattern 27S: 5′-nnnnNfnnNfNfnNfnnnnnnnnsnsn-3′, wherein “Nf” is a 2′ fluoro-modified nucleoside, “n” is a 2′ O-methyl modified nucleoside, and “s” is a phosphorothioate linkage. In some embodiments, the sense strand comprises modification pattern 28S: 5′-nnnnNfnNfnNfnNfnnnnnnnnsnsn-3′, wherein “Nf” is a 2′ fluoro-modified nucleoside, “n” is a 2′ O-methyl modified nucleoside, and “s” is a phosphorothioate linkage. In some embodiments, the sense strand comprises modification pattern 29S: 5′-nnnnNfNfnNfNfnnnnnnnnnnsnsn-3′, wherein “Nf” is a 2′ fluoro-modified nucleoside, “n” is a 2′ O-methyl modified nucleoside, and “s” is a phosphorothioate linkage. In some embodiments, the sense strand comprises modification pattern 30S: 5′-nnnnNfNfnNfNfnNfnnnnnnnnsnsn-3′, wherein “Nf” is a 2′ fluoro-modified nucleoside, “n” is a 2′ O-methyl modified nucleoside, and “s” is a phosphorothioate linkage. In some embodiments, the sense strand comprises modification pattern 31S: 5′-nnnnNfNfNfNfNfnnnnnnnnnnsnsn-3′, wherein “Nf” is a 2′ fluoro-modified nucleoside, “n” is a 2′ O-methyl modified nucleoside, and “s” is a phosphorothioate linkage. In some embodiments, the sense strand comprises modification pattern 32S: 5′-nnnnnnnNfNfNfNfnnnnnnnnsnsn-3′, wherein “Nf” is a 2′ fluoro-modified nucleoside, “n” is a 2′ O-methyl modified nucleoside, and “s” is a phosphorothioate linkage. In some embodiments, the sense strand comprises modification pattern 33S: 5′-nnnnnnNfNfNfNfnnnnnnnnnsnsn-3′, wherein “Nf” is a 2′ fluoro-modified nucleoside, “n” is a 2′ O-methyl modified nucleoside, and “s” is a phosphorothioate linkage. In some embodiments, the sense strand comprises modification pattern 34S: 5′-nnnnnnNfNfNfNfNfnnnnnnnnsnsn-3′, wherein “Nf” is a 2′ fluoro-modified nucleoside, “n” is a 2′ O-methyl modified nucleoside, and “s” is a phosphorothioate linkage. In some embodiments, the sense strand comprises modification pattern 35S: 5′-nnnnnNfnnNfNfnnnnnnnnnsnsn-3′, wherein “Nf” is a 2′ fluoro-modified nucleoside, “n” is a 2′ O-methyl modified nucleoside, and “s” is a phosphorothioate linkage. In some embodiments, the sense strand comprises modification pattern 36S: 5′-nnnnnNfnNfNfNfNfnnnnnnnnsnsn-3′, wherein “Nf” is a 2′ fluoro-modified nucleoside, “n” is a 2′ O-methyl modified nucleoside, and “s” is a phosphorothioate linkage. In some embodiments, the sense strand comprises modification pattern 37S: 5′-nnnnnNfNfnNfNfnnnnnnnnnsnsn-3′, wherein “Nf” is a 2′ fluoro-modified nucleoside, “n” is a 2′ O-methyl modified nucleoside, and “s” is a phosphorothioate linkage. In some embodiments, the sense strand comprises modification pattern 38S: 5′-nnnnnNfNfNfNfNfnnnnnnnnnsnsn-3′, wherein “Nf” is a 2′ fluoro-modified nucleoside, “n” is a 2′ O-methyl modified nucleoside, and “s” is a phosphorothioate linkage. In some embodiments, the sense strand comprises modification pattern 39S: 5′-nnnnNfnnnNfNfnnnnnnnnnsnsn-3′, wherein “Nf” is a 2′ fluoro-modified nucleoside, “n” is a 2′ O-methyl modified nucleoside, and “s” is a phosphorothioate linkage. In some embodiments, the sense strand comprises modification pattern 40S: 5′-nnnnNfnnNfNfNfNfnnnnnnnnsnsn-3′, wherein “Nf” is a 2′ fluoro-modified nucleoside, “n” is a 2′ O-methyl modified nucleoside, and “s” is a phosphorothioate linkage. In some embodiments, the sense strand comprises modification pattern 41S: 5′-nnnnNfnNfnNfNfnnnnnnnnnsnsn-3′, wherein “Nf” is a 2′ fluoro-modified nucleoside, “n” is a 2′ O-methyl modified nucleoside, and “s” is a phosphorothioate linkage. In some embodiments, the sense strand comprises modification pattern 42S: 5′-nnnnNfnNfNfNfNfnnnnnnnnnsnsn-3′, wherein “Nf” is a 2′ fluoro-modified nucleoside, “n” is a 2′ O-methyl modified nucleoside, and “s” is a phosphorothioate linkage. In some embodiments, the sense strand comprises modification pattern 43S: 5′-nnnnNfNfnnNfNfnnnnnnnnnsnsn-3′, wherein “Nf” is a 2′ fluoro-modified nucleoside, “n” is a 2′ O-methyl modified nucleoside, and “s” is a phosphorothioate linkage. In some embodiments, the sense strand comprises modification pattern 44S: 5′-nnnnnnnNfNfnnnnnnnnnnsnsn-3′, wherein “Nf” is a 2′ fluoro-modified nucleoside, “n” is a 2′ O-methyl modified nucleoside, and “s” is a phosphorothioate linkage. In some embodiments, the sense strand comprises modification pattern 45S: 5′-nnnnNfnNfNfdNnnnnnnnnnnsnsn-3′, wherein “Nf” is a 2′ fluoro-modified nucleoside, “n” is a 2′ O-methyl modified nucleoside, “dN” is a 2′ deoxy nucleoside, and “s” is a phosphorothioate linkage. In some embodiments, the sense strand comprises modification pattern 46S: 5′-nnnnnnnnNfnNfnnnnnnnnsnsn-3′, wherein “Nf” is a 2′ fluoro-modified nucleoside, “n” is a 2′ O-methyl modified nucleoside, and “s” is a phosphorothioate linkage. In some embodiments, the sense strand comprises modification pattern 47S: 5′-nnnnNfnNfNfdTnNfnnnnnnnnsnsn-3′, wherein “Nf” is a 2′ fluoro-modified nucleoside, “n” is a 2′ O-methyl modified nucleoside, and “s” is a phosphorothioate linkage. In some embodiments, the sense strand comprises modification pattern 48S: 5′-nnnnNfnNfNfdNnNfnnnnnnnnsnsn-3′, wherein “Nf” is a 2′ fluoro-modified nucleoside, “n” is a 2′ O-methyl modified nucleoside, “dN” is a 2′ deoxy nucleoside, and “s” is a phosphorothioate linkage. In some embodiments, the sense strand comprises modification pattern 49S: 5′-nnnnNfnNfNfdTnnnnnnnnnnsnsn-3′, wherein “Nf” is a 2′ fluoro-modified nucleoside, “n” is a 2′ O-methyl modified nucleoside, and “s” is a phosphorothioate linkage. In some embodiments, the sense strand comprises modification pattern 50S: 5′-snnnnnNfNfnNfnnnnnnnnnnsnsn-3′, wherein “Nf” is a 2′ fluoro-modified nucleoside, “n” is a 2′ O-methyl modified nucleoside, and “s” is a phosphorothioate linkage. In some embodiments, the sense strand comprises modification pattern 51S: 5′-snnnnNfnNfNfdNNfnnnnnnnnnsnsn-3′, wherein “Nf” is a 2′ fluoro-modified nucleoside, “n” is a 2′ O-methyl modified nucleoside, “dN” is a 2′ deoxy nucleoside, and “s” is a phosphorothioate linkage. In some embodiments, the sense strand comprises modification pattern 52S: 5′-snnnnnNfNfnNfnnnnnnnnnnsnsn-3′, wherein “Nf” is a 2′ fluoro-modified nucleoside, “n” is a 2′ O-methyl modified nucleoside, and “s” is a phosphorothioate linkage. In some embodiments, the sense strand comprises modification pattern 53S: 5′-snnnnNfnNfNfdNNfnnnnnnnnnsnsn-3′, wherein “Nf” is a 2′ fluoro-modified nucleoside, “n” is a 2′ O-methyl modified nucleoside, “dN” is a 2′ deoxy nucleoside, and “s” is a phosphorothioate linkage. In some embodiments, the sense strand comprises modification pattern 54S: 5′-snnnnnNfnNfNfnNfnnnnnnnnsnsn-3′, wherein “Nf” is a 2′ fluoro-modified nucleoside, “n” is a 2′ O-methyl modified nucleoside, and “s” is a phosphorothioate linkage. In some embodiments, the sense strand comprises modification pattern 55S: 5′-snnnnnnNfnNfNfnnnnnnnnnsnsn-3′, wherein “Nf” is a 2′ fluoro-modified nucleoside, “n” is a 2′ O-methyl modified nucleoside, and “s” is a phosphorothioate linkage. In some embodiments, the sense strand comprises modification pattern 56S: 5′-snnnnNfNfnnNfnnnnnnnnnnsnsn-3′, wherein “Nf” is a 2′ fluoro-modified nucleoside, “n” is a 2′ O-methyl modified nucleoside, and “s” is a phosphorothioate linkage. In some embodiments, the sense strand comprises modification pattern 57S: 5′-snnnnnNfnNfNfnnnnnnnnnnsnsn-3′, wherein “Nf” is a 2′ fluoro-modified nucleoside, “n” is a 2′ O-methyl modified nucleoside, and “s” is a phosphorothioate linkage. In some embodiments, the sense strand comprises modification pattern 58S: 5′-snnnnNfNfnnNfnNfnnnnnnnnsnsn-3′, wherein “Nf” is a 2′ fluoro-modified nucleoside, “n” is a 2′ O-methyl modified nucleoside, and “s” is a phosphorothioate linkage. In some embodiments, the sense strand comprises modification pattern 59S: 5′-snnnnNfNfNfNfNfnnnnnnnnnnsnsn-3′, wherein “Nf” is a 2′ fluoro-modified nucleoside, “n” is a 2′ O-methyl modified nucleoside, and “s” is a phosphorothioate linkage. In some embodiments, the sense strand comprises modification pattern 60S: 5′-snnnnNfnNfNfdNnnnnnnnnnnsnsn-3′, wherein “Nf” is a 2′ fluoro-modified nucleoside, “n” is a 2′ O-methyl modified nucleoside, “dN” is a 2′ deoxy nucleoside, and “s” is a phosphorothioate linkage. In some embodiments, the sense strand comprises modification pattern 61S: 5′-snnnnNfNfnnNfNfnnnnnnnnnsnsn-3′, wherein “Nf” is a 2′ fluoro-modified nucleoside, “n” is a 2′ O-methyl modified nucleoside, and “s” is a phosphorothioate linkage. In some embodiments, the sense strand comprises modification pattern 62S: 5′-snnnnNfnnNfNfnNfhnnnnnnnsnsn-3′, wherein “Nf” is a 2′ fluoro-modified nucleoside, “n” is a 2′ O-methyl modified nucleoside, and “s” is a phosphorothioate linkage. In some embodiments, the sense strand comprises modification pattern 63S: 5′-snnnnNfnNfNfdTnNfnnnnnnnnsnsn-3′, wherein “Nf” is a 2′ fluoro-modified nucleoside, “n” is a 2′ O-methyl modified nucleoside, and “s” is a phosphorothioate linkage. In some embodiments, the sense strand comprises modification pattern 64S: 5′-snnnnNfnNfnNfNfnnnnnnnnnsnsn-3′, wherein “Nf” is a 2′ fluoro-modified nucleoside, “n” is a 2′ O-methyl modified nucleoside, and “s” is a phosphorothioate linkage. In some embodiments, the sense strand comprises modification pattern 65S: 5′-snnnnnNfnnNfNfnnnnnnnnnsnsn-3′, wherein “Nf” is a 2′ fluoro-modified nucleoside, “n” is a 2′ O-methyl modified nucleoside, and “s” is a phosphorothioate linkage. In some embodiments, the sense strand comprises modification pattern 66S: 5′-snnnnNfnNfNfdNnNfnnnnnnnnsnsn-3′, “dN” is a 2′ deoxy nucleoside, wherein “Nf” is a 2′ fluoro-modified nucleoside, “n” is a 2′ O-methyl modified nucleoside, and “s” is a phosphorothioate linkage. In some embodiments, the sense strand comprises modification pattern 67S: 5′-snnnnNfnNfNfNfNfnnnnnnnnnsnsn-3′, wherein “Nf” is a 2′ fluoro-modified nucleoside, “n” is a 2′ O-methyl modified nucleoside, and “s” is a phosphorothioate linkage. In some embodiments, the sense strand comprises modification pattern 68S: 5′-snnnnnNfNfNfNfNfnnnnnnnnnsnsn-3′, wherein “Nf” is a 2′ fluoro-modified nucleoside, “n” is a 2′ O-methyl modified nucleoside, and “s” is a phosphorothioate linkage. In some embodiments, the sense strand comprises modification pattern 69S: 5′-snnnnNfnnNfNfnnnnnnnnnnsnsn-3′, wherein “Nf” is a 2′ fluoro-modified nucleoside, “n” is a 2′ O-methyl modified nucleoside, and “s” is a phosphorothioate linkage. In some embodiments, the sense strand comprises modification pattern 70S: 5′-snnnnnnNfnNfnNfnnnnnnnnsnsn-3′, wherein “Nf” is a 2′ fluoro-modified nucleoside, “n” is a 2′ O-methyl modified nucleoside, and “s” is a phosphorothioate linkage. In some embodiments, the sense strand comprises modification pattern 71S: 5′-snnnnNfnNfnNfnnnnnnnnnnsnsn-3′, wherein “Nf” is a 2′ fluoro-modified nucleoside, “n” is a 2′ O-methyl modified nucleoside, “m” is a methyoxyethyl modified nucleoside, and “s” is a phosphorothioate linkage. In some embodiments, the sense strand comprises modification pattern 72S: 5′-snnnnNfnnnNfNfnnnnnnnnnsnsn-3′, wherein “Nf” is a 2′ fluoro-modified nucleoside, “n” is a 2′ O-methyl modified nucleoside, “m” is a methyoxyethyl modified nucleoside, and “s” is a phosphorothioate linkage. In some embodiments, the sense strand comprises modification pattern 73S: 5′-snnnNmnNfNfNfNfnnnmnnnnnnsnsn-3′, wherein “Nm” is a 2′ methoxy ethyl-modified nucleoside, wherein “Nf” is a 2′ fluoro-modified nucleoside, “n” is a 2′ O-methyl modified nucleoside, and “s” is a phosphorothioate linkage.

[0144] In some embodiments, the composition comprises an oligonucleotide that inhibits the expression of HGFAC, wherein the oligonucleotide comprises an siRNA comprising a sense strand and an antisense strand, wherein the antisense strand comprises modification pattern 1AS: 5′-nsNfsnNfnNfnNfnNfnnnNfnNfnNfnsnsn-3′, wherein “Nf” is a 2′ fluoro-modified nucleoside, “n” is a 2′ O-methyl modified nucleoside, and “s” is a phosphorothioate linkage. In some embodiments, the antisense strand comprises modification pattern 2AS: 5′-nsNfsnnnNfnNfNfnnnnNfnNfnnnsnsn-3′, wherein “Nf” is a 2′ fluoro-modified nucleoside, “n” is a 2′ O-methyl modified nucleoside, and “s” is a phosphorothioate linkage. In some embodiments, the antisense strand comprises modification pattern 3AS: 5′-nsNfsnnnNfnnnnnnnNfnNfnnnsnsn-3′, wherein “Nf” is a 2′ fluoro-modified nucleoside, “n” is a 2′ O-methyl modified nucleoside, and “s” is a phosphorothioate linkage. In some embodiments, the antisense strand comprises modification pattern 4AS: 5′-nsNfsnNfnNfnnnnnnnNfhNfnnnsnsn-3′, wherein “Nf” is a 2′ fluoro-modified nucleoside, “n” is a 2′ O-methyl modified nucleoside, and “s” is a phosphorothioate linkage. In some embodiments, the antisense strand comprises modification pattern 5AS: 5′-nsNfsnnnnnnnnnnnNfnNfnnnsnsn-3′, wherein “Nf” is a 2′ fluoro-modified nucleoside, “n” is a 2′ O-methyl modified nucleoside, and “s” is a phosphorothioate linkage. In some embodiments, the antisense strand comprises modification pattern 6AS: 5′-nsNfsnnnNfnnNfnnnnNfnNfnnnsnsn-3′, wherein “Nf” is a 2′ fluoro-modified nucleoside, “n” is a 2′ O-methyl modified nucleoside, and “s” is a phosphorothioate linkage. In some embodiments, the antisense strand comprises modification pattern 7AS: 5′-nsNfsnNfnNfnNfnNfnNfnNfnNfnNfnsnsn-3′, wherein “Nf” is a 2′ fluoro-modified nucleoside, “n” is a 2′ O-methyl modified nucleoside, and “s” is a phosphorothioate linkage. In some embodiments, the antisense strand comprises modification pattern 8AS: 5′-nsNfsnnnnnnnnnnnNfnnnnnsnsn-3′, wherein “Nf” is a 2′ fluoro-modified nucleoside, “n” is a 2′ O-methyl modified nucleoside, and “s” is a phosphorothioate linkage. In some embodiments, the antisense strand comprises modification pattern 9AS: 5′-nsNfsnnnnnnnnnnnNfnnnnnsnsn-3′, wherein “Nf” is a 2′ fluoro-modified nucleoside, “n” is a 2′ O-methyl modified nucleoside, and “s” is a phosphorothioate linkage. In some embodiments, the antisense strand comprises modification pattern 10AS: 5′-nnnNfnNfnNfnNfnNfnNfnNfnNfnsnsn-3′, wherein “Nf” is a 2′ fluoro-modified nucleoside, “n” is a 2′ O-methyl modified nucleoside, and “s” is a phosphorothioate linkage. In some embodiments, the antisense strand comprises modification pattern 12AS: 5′-nsNfsnnnNfnNfnNfnnnNfnNfnNfnsnsn-3′, wherein “Nf” is a 2′ fluoro-modified nucleoside, “n” is a 2′ O-methyl modified nucleoside, and “s” is a phosphorothioate linkage. In some embodiments, the antisense strand comprises modification pattern 13AS: 5′-nsNfsnnnNfnNfnNfnnnNfnNfnnnsnsn-3′, wherein “Nf” is a 2′ fluoro-modified nucleoside, “n” is a 2′ O-methyl modified nucleoside, and “s” is a phosphorothioate linkage. In some embodiments, the antisense strand comprises modification pattern 14AS: 5′-nsNfsnnnNfNfnnNfnNfnNfnNfnNfnsnsn-3′, wherein “Nf” is a 2′ fluoro-modified nucleoside, “n” is a 2′ O-methyl modified nucleoside, and “s” is a phosphorothioate linkage. In some embodiments, the antisense strand comprises modification pattern 15AS: 5′-nsNfsnnnnNfnnNfnNfnNfnNfnNfnsnsn-3′, wherein “Nf” is a 2′ fluoro-modified nucleoside, “n” is a 2′ O-methyl modified nucleoside, and “s” is a phosphorothioate linkage. In some embodiments, the antisense strand comprises modification pattern 16AS: 5′-nsNfsnnNfnNfnnNfnNfnNfnNfnNfnsnsn-3′, wherein “Nf” is a 2′ fluoro-modified nucleoside, “n” is a 2′ O-methyl modified nucleoside, and “s” is a phosphorothioate linkage. In some embodiments, the antisense strand comprises modification pattern: 5′-nsNfsnnNfnNfnnNfnnnNfnNfnNfnsnsn-3′, wherein “Nf” is a 2′ fluoro-modified nucleoside, “n” is a 2′ O-methyl modified nucleoside, and “s” is a phosphorothioate linkage.

[0145] In some embodiments, the composition comprises an oligonucleotide that inhibits the expression of HGFAC, wherein the oligonucleotide comprises an siRNA comprising a sense strand and an antisense strand, wherein the sense strand comprises pattern 1S and the antisense strand comprises pattern 1AS, 2AS, 3AS, 4AS, 5AS, 6AS, 7AS, 8AS, 9AS, 10AS, 11AS, 12AS, 13AS, 14AS, 15AS, or 16AS. In some embodiments, the sense strand comprises pattern 2S and the antisense strand comprises pattern 1AS, 2AS, 3AS, 4AS, 5AS, 6AS, 7AS, 8AS, 9AS, 10AS, 11AS, 12AS, 13AS, 14AS, 15AS, or 16AS. In some embodiments, the sense strand comprises pattern 3S and the antisense strand comprises pattern 1AS, 2AS, 3AS, 4AS, 5AS, 6AS, 7AS, 8AS, 9AS, 10AS, 11AS, 12AS, 13AS, 14AS, 15AS, or 16AS. In some embodiments, the sense strand comprises pattern 4S and the antisense strand comprises pattern 1AS, 2AS, 3AS, 4AS, 5AS, 6AS, 7AS, 8AS, 9AS, 10AS, 11AS, 12AS, 13AS, 14AS, 15AS, or 16AS. In some embodiments, the sense strand comprises pattern 5S and the antisense strand comprises pattern 1AS, 2AS, 3AS, 4AS, 5AS, 6AS, 7AS, 8AS, 9AS, 10AS, 11AS, 12AS, 13AS, 14AS, 15AS, or 16AS. In some embodiments, the sense strand comprises pattern 6S and the antisense strand comprises pattern 1AS, 2AS, 3AS, 4AS, 5AS, 6AS, 7AS, 8AS, 9AS, 10AS, 11AS, 12AS, 13AS, 14AS, 15AS, or 16AS. In some embodiments, the sense strand comprises pattern 7S and the antisense strand comprises pattern 1AS, 2AS, 3AS, 4AS, 5AS, 6AS, 7AS, 8AS, 9AS, 10AS, 11AS, 12AS, 13AS, 14AS, 15AS, or 16AS. In some embodiments, the sense strand comprises pattern 8S and the antisense strand comprises pattern 1AS, 2AS, 3AS, 4AS, 5AS, 6AS, 7AS, 8AS, 9AS, 10AS, 11AS, 12AS, 13AS, 14AS, 15AS, or 16AS. In some embodiments, the sense strand comprises pattern 9S and the antisense strand comprises pattern 1AS, 2AS, 3AS, 4AS, 5AS, 6AS, 7AS, 8AS, 9AS, 10AS, 11AS, 12AS, 13AS, 14AS, 15AS, or 16AS. In some embodiments, the sense strand comprises pattern 10S and the antisense strand comprises pattern 1AS, 2AS, 3AS, 4AS, 5AS, 6AS, 7AS, 8AS, 9AS, 10AS, 11 AS, 12AS, 13AS, 14AS, 15AS, or 16AS. In some embodiments, the sense strand comprises pattern 11 S and the antisense strand comprises pattern 1AS, 2AS, 3AS, 4AS, 5AS, 6AS, 7AS, 8AS, 9AS, 10AS, 11 AS, 12AS, 13AS, 14AS, 15AS, or 16AS. In some embodiments, the sense strand comprises pattern 12S and the antisense strand comprises pattern 1AS, 2AS, 3AS, 4AS, 5AS, 6AS, 7AS, 8AS, 9AS, 10AS, 11 AS, 12AS, 13AS, 14AS, 15AS, or 16AS. In some embodiments, the sense strand comprises pattern 13S and the antisense strand comprises pattern 1AS, 2AS, 3AS, 4AS, 5AS, 6AS, 7AS, 8AS, 9AS, 10AS, 11 AS, 12AS, 13AS, 14AS, 15AS, or 16AS. In some embodiments, the sense strand comprises pattern 14S and the antisense strand comprises pattern 1AS, 2AS, 3AS, 4AS, 5AS, 6AS, 7AS, 8AS, 9AS, 10AS, 11 AS, 12AS, 13AS, 14AS, 15AS, or 16AS. In some embodiments, the sense strand comprises pattern 15S and the antisense strand comprises pattern 1AS, 2AS, 3AS, 4AS, 5AS, 6AS, 7AS, 8AS, 9AS, 10AS, 11 AS, 12AS, 13AS, 14AS, 15AS, or 16AS. In some embodiments, the sense strand comprises pattern 16S and the antisense strand comprises pattern 1AS, 2AS, 3AS, 4AS, 5AS, 6AS, 7AS, 8AS, 9AS, 10AS, 11 AS, 12AS, 13AS, 14AS, 15AS, or 16AS. In some embodiments, the sense strand comprises pattern 17S and the antisense strand comprises pattern 1AS, 2AS, 3AS, 4AS, 5AS, 6AS, 7AS, 8AS, 9AS, 10AS, 11 AS, 12AS, 13AS, 14AS, 15AS, or 16AS. In some embodiments, the sense strand comprises pattern 18S and the antisense strand comprises pattern 1AS, 2AS, 3AS, 4AS, 5AS, 6AS, 7AS, 8AS, 9AS, 10AS, 11 AS, 12AS, 13AS, 14AS, 15AS, or 16AS. In some embodiments, the sense strand comprises pattern 19S and the antisense strand comprises pattern 1AS, 2AS, 3AS, 4AS, 5AS, 6AS, 7AS, 8AS, 9AS, 10AS, 11 AS, 12AS, 13AS, 14AS, 15AS, or 16AS. In some embodiments, the sense strand comprises pattern 20S and the antisense strand comprises pattern 1AS, 2AS, 3AS, 4AS, 5AS, 6AS, 7AS, 8AS, 9AS, 10AS, 11 AS, 12AS, 13AS, 14AS, 15AS, or 16AS. In some embodiments, the sense strand comprises pattern 21S and the antisense strand comprises pattern 1AS, 2AS, 3AS, 4AS, 5AS, 6AS, 7AS, 8AS, 9AS, 10AS, 11AS, 12AS, 13AS, 14AS, 15AS, or 16AS. In some embodiments, the sense strand comprises pattern 22S and the antisense strand comprises pattern 1AS, 2AS, 3AS, 4AS, 5AS, 6AS, 7AS, 8AS, 9AS, 10AS, 11 AS, 12AS, 13AS, 14AS, 15AS, or 16AS. In some embodiments, the sense strand comprises pattern 23S and the antisense strand comprises pattern 1AS, 2AS, 3AS, 4AS, 5AS, 6AS, 7AS, 8AS, 9AS, 10AS, 11 AS, 12AS, 13AS, 14AS, 15AS, or 16AS. In some embodiments, the sense strand comprises pattern 24S and the antisense strand comprises pattern 1AS, 2AS, 3AS, 4AS, 5AS, 6AS, 7AS, 8AS, 9AS, 10AS, 11 AS, 12AS, 13AS, 14AS, 15AS, or 16AS. In some embodiments, the sense strand comprises pattern 25S and the antisense strand comprises pattern 1AS, 2AS, 3AS, 4AS, 5AS, 6AS, 7AS, 8AS, 9AS, 10AS, 11 AS, 12AS, 13AS, 14AS, 15AS, or 16AS. In some embodiments, the sense strand comprises pattern 26S and the antisense strand comprises pattern 1AS, 2AS, 3AS, 4AS, 5AS, 6AS, 7AS, 8AS, 9AS, 10AS, 11 AS, 12AS, 13AS, 14AS, 15AS, or 16AS. In some embodiments, the sense strand comprises pattern 27S and the antisense strand comprises pattern 1AS, 2AS, 3AS, 4AS, 5AS, 6AS, 7AS, 8AS, 9AS, 10AS, 11 AS, 12AS, 13AS, 14AS, 15AS, or 16AS. In some embodiments, the sense strand comprises pattern 28S and the antisense strand comprises pattern 1AS, 2AS, 3AS, 4AS, 5AS, 6AS, 7AS, 8AS, 9AS, 10AS, 11 AS, 12AS, 13AS, 14AS, 15AS, or 16AS. In some embodiments, the sense strand comprises pattern 29S and the antisense strand comprises pattern 1AS, 2AS, 3AS, 4AS, 5AS, 6AS, 7AS, 8AS, 9AS, 10AS, 11 AS, 12AS, 13AS, 14AS, 15AS, or 16AS. In some embodiments, the sense strand comprises pattern 30S and the antisense strand comprises pattern 1AS, 2AS, 3AS, 4AS, 5AS, 6AS, 7AS, 8AS, 9AS, 10AS, 11 AS, 12AS, 13AS, 14AS, 15AS, or 16AS. In some embodiments, the sense strand comprises pattern 31S and the antisense strand comprises pattern 1AS, 2AS, 3AS, 4AS, 5AS, 6AS, 7AS, 8AS, 9AS, 10AS, 11 AS, 12AS, 13AS, 14AS, 15AS, or 16AS. In some embodiments, the sense strand comprises pattern 32S and the antisense strand comprises pattern 1AS, 2AS, 3AS, 4AS, 5AS, 6AS, 7AS, 8AS, 9AS, 10AS, 11 AS, 12AS, 13AS, 14AS, 15AS, or 16AS. In some embodiments, the sense strand comprises pattern 33S and the antisense strand comprises pattern 1AS, 2AS, 3AS, 4AS, 5AS, 6AS, 7AS, 8AS, 9AS, 10AS, 11AS, 12AS, 13AS, 14AS, 15AS, or 16AS. In some embodiments, the sense strand comprises pattern 34S and the antisense strand comprises pattern 1AS, 2AS, 3AS, 4AS, 5AS, 6AS, 7AS, 8AS, 9AS, 10AS, 11 AS, 12AS, 13AS, 14AS, 15AS, or 16AS. In some embodiments, the sense strand comprises pattern 35S and the antisense strand comprises pattern 1AS, 2AS, 3AS, 4AS, 5AS, 6AS, 7AS, 8AS, 9AS, 10AS, 11 AS, 12AS, 13AS, 14AS, 15AS, or 16AS. In some embodiments, the sense strand comprises pattern 36S and the antisense strand comprises pattern 1AS, 2AS, 3AS, 4AS, 5AS, 6AS, 7AS, 8AS, 9AS, 10AS, 11 AS, 12AS, 13AS, 14AS, 15AS, or 16AS. In some embodiments, the sense strand comprises pattern 37S and the antisense strand comprises pattern 1AS, 2AS, 3AS, 4AS, 5AS, 6AS, 7AS, 8AS, 9AS, 10AS, 11 AS, 12AS, 13AS, 14AS, 15AS, or 16AS. In some embodiments, the sense strand comprises pattern 38S and the antisense strand comprises pattern 1AS, 2AS, 3AS, 4AS, 5AS, 6AS, 7AS, 8AS, 9AS, 10AS, 11 AS, 12AS, 13AS, 14AS, 15AS, or 16AS. In some embodiments, the sense strand comprises pattern 39S and the antisense strand comprises pattern 1AS, 2AS, 3AS, 4AS, 5AS, 6AS, 7AS, 8AS, 9AS, 10AS, 11 AS, 12AS, 13AS, 14AS, 15AS, or 16AS. In some embodiments, the sense strand comprises pattern 40S and the antisense strand comprises pattern 1AS, 2AS, 3AS, 4AS, 5AS, 6AS, 7AS, 8AS, 9AS, 10AS, 11 AS, 12AS, 13AS, 14AS, 15AS, or 16AS. In some embodiments, the sense strand comprises pattern 41S and the antisense strand comprises pattern 1AS, 2AS, 3AS, 4AS, 5AS, 6AS, 7AS, 8AS, 9AS, 10AS, 11AS, 12AS, 13AS, 14AS, 15AS, or 16AS. In some embodiments, the sense strand comprises pattern 42S and the antisense strand comprises pattern 1AS, 2AS, 3AS, 4AS, 5AS, 6AS, 7AS, 8AS, 9AS, 10AS, 11 AS, 12AS, 13AS, 14AS, 15AS, or 16AS. In some embodiments, the sense strand comprises pattern 43S and the antisense strand comprises pattern 1AS, 2AS, 3AS, 4AS, 5AS, 6AS, 7AS, 8AS, 9AS, 10AS, 11 AS, 12AS, 13AS, 14AS, 15AS, or 16AS. In some embodiments, the sense strand comprises pattern 44S and the antisense strand comprises pattern 1AS, 2AS, 3AS, 4AS, 5AS, 6AS, 7AS, 8AS, 9AS, 10AS, 11 AS, 12AS, 13AS, 14AS, 15AS, or 16AS. In some embodiments, the sense strand comprises pattern 45S and the antisense strand comprises pattern 1AS, 2AS, 3AS, 4AS, 5AS, 6AS, 7AS, 8AS, 9AS, 10AS, 11 AS, 12AS, 13AS, 14AS, 15AS, or 16AS. In some embodiments, the sense strand comprises pattern 46S and the antisense strand comprises pattern 1AS, 2AS, 3AS, 4AS, 5AS, 6AS, 7AS, 8AS, 9AS, 10AS, 11 AS, 12AS, 13AS, 14AS, 15AS, or 16AS. In some embodiments, the sense strand comprises pattern 47S and the antisense strand comprises pattern 1AS, 2AS, 3AS, 4AS, 5AS, 6AS, 7AS, 8AS, 9AS, 10AS, 11 AS, 12AS, 13AS, 14AS, 15AS, or 16AS. In some embodiments, the sense strand comprises pattern 48S and the antisense strand comprises pattern 1AS, 2AS, 3AS, 4AS, 5AS, 6AS, 7AS, 8AS, 9AS, 10AS, 11 AS, 12AS, 13AS, 14AS, 15AS, or 16AS. In some embodiments, the sense strand comprises pattern 49S and the antisense strand comprises pattern 1AS, 2AS, 3AS, 4AS, 5AS, 6AS, 7AS, 8AS, 9AS, 10AS, 11AS, 12AS, 13AS, 14AS, 15AS, or 16AS. In some embodiments, the sense strand comprises pattern 50S and the antisense strand comprises pattern 1AS, 2AS, 3AS, 4AS, 5AS, 6AS, 7AS, 8AS, 9AS, 10AS, 11 AS, 12AS, 13AS, 14AS, 15AS, or 16AS. In some embodiments, the sense strand comprises pattern 51S and the antisense strand comprises pattern 1AS, 2AS, 3AS, 4AS, 5AS, 6AS, 7AS, 8AS, 9AS, 10AS, 11 AS, 12AS, 13AS, 14AS, 15AS, or 16AS. In some embodiments, the sense strand comprises pattern 52S and the antisense strand comprises pattern 1AS, 2AS, 3AS, 4AS, 5AS, 6AS, 7AS, 8AS, 9AS, 10AS, 11 AS, 12AS, 13AS, 14AS, 15AS, or 16AS. In some embodiments, the sense strand comprises pattern 53S and the antisense strand comprises pattern 1AS, 2AS, 3AS, 4AS, 5AS, 6AS, 7AS, 8AS, 9AS, 10AS, 11 AS, 12AS, 13AS, 14AS, 15AS, or 16AS. In some embodiments, the sense strand comprises pattern 54S and the antisense strand comprises pattern 1AS, 2AS, 3AS, 4AS, 5AS, 6AS, 7AS, 8AS, 9AS, 10AS, 11 AS, 12AS, 13AS, 14AS, 15AS, or 16AS. In some embodiments, the sense strand comprises pattern 55S and the antisense strand comprises pattern 1AS, 2AS, 3AS, 4AS, 5AS, 6AS, 7AS, 8AS, 9AS, 10AS, 11 AS, 12AS, 13AS, 14AS, 15AS, or 16AS. In some embodiments, the sense strand comprises pattern 56S and the antisense strand comprises pattern 1AS, 2AS, 3AS, 4AS, 5AS, 6AS, 7AS, 8AS, 9AS, 10AS, 11 AS, 12AS, 13AS, 14AS, 15AS, or 16AS. In some embodiments, the sense strand comprises pattern 57S and the antisense strand comprises pattern 1AS, 2AS, 3AS, 4AS, 5AS, 6AS, 7AS, 8AS, 9AS, 10AS, 11 AS, 12AS, 13AS, 14AS, 15AS, or 16AS. In some embodiments, the sense strand comprises pattern 58S and the antisense strand comprises pattern 1AS, 2AS, 3AS, 4AS, 5AS, 6AS, 7AS, 8AS, 9AS, 10AS, 11 AS, 12AS, 13AS, 14AS, 15AS, or 16AS. In some embodiments, the sense strand comprises pattern 59S and the antisense strand comprises pattern 1AS, 2AS, 3AS, 4AS, 5AS, 6AS, 7AS, 8AS, 9AS, 10AS, 11 AS, 12AS, 13AS, 14AS, 15AS, or 16AS. In some embodiments, the sense strand comprises pattern 60S and the antisense strand comprises pattern 1AS, 2AS, 3AS, 4AS, 5AS, 6AS, 7AS, 8AS, 9AS, 10AS, 11 AS, 12AS, 13AS, 14AS, 15AS, or 16AS. In some embodiments, the sense strand comprises pattern 61S and the antisense strand comprises pattern 1AS, 2AS, 3AS, 4AS, 5AS, 6AS, 7AS, 8AS, 9AS, 10AS, 11 AS, 12AS, 13AS, 14AS, 15AS, or 16AS. In some embodiments, the sense strand comprises pattern 62S and the antisense strand comprises pattern 1AS, 2AS, 3AS, 4AS, 5AS, 6AS, 7AS, 8AS, 9AS, 10AS, 11 AS, 12AS, 13AS, 14AS, 15AS, or 16AS. In some embodiments, the sense strand comprises pattern 63S and the antisense strand comprises pattern 1AS, 2AS, 3AS, 4AS, 5AS, 6AS, 7AS, 8AS, 9AS, 10AS, 11 AS, 12AS, 13AS, 14AS, 15AS, or 16AS. In some embodiments, the sense strand comprises pattern 64S and the antisense strand comprises pattern 1AS, 2AS, 3AS, 4AS, 5AS, 6AS, 7AS, 8AS, 9AS, 10AS, 11 AS, 12AS, 13AS, 14AS, 15AS, or 16AS. In some embodiments, the sense strand comprises pattern 65S and the antisense strand comprises pattern 1AS, 2AS, 3AS, 4AS, 5AS, 6AS, 7AS, 8AS, 9AS, 10AS, 11 AS, 12AS, 13AS, 14AS, 15AS, or 16AS. In some embodiments, the sense strand comprises pattern 66S and the antisense strand comprises pattern 1AS, 2AS, 3AS, 4AS, 5AS, 6AS, 7AS, 8AS, 9AS, 10AS, 11 AS, 12AS, 13AS, 14AS, 15AS, or 16AS. In some embodiments, the sense strand comprises pattern 67S and the antisense strand comprises pattern 1AS, 2AS, 3AS, 4AS, 5AS, 6AS, 7AS, 8AS, 9AS, 10AS, 11 AS, 12AS, 13AS, 14AS, 15AS, or 16AS. In some embodiments, the sense strand comprises pattern 68S and the antisense strand comprises pattern 1AS, 2AS, 3AS, 4AS, 5AS, 6AS, 7AS, 8AS, 9AS, 10AS, 11 AS, 12AS, 13AS, 14AS, 15AS, or 16AS. In some embodiments, the sense strand comprises pattern 69S and the antisense strand comprises pattern 1AS, 2AS, 3AS, 4AS, 5AS, 6AS, 7AS, 8AS, 9AS, 10AS, 11 AS, 12AS, 13AS, 14AS, 15AS, or 16AS. In some embodiments, the sense strand comprises pattern 70S and the antisense strand comprises pattern 1AS, 2AS, 3AS, 4AS, 5AS, 6AS, 7AS, 8AS, 9AS, 10AS, 11 AS, 12AS, 13AS, 14AS, 15AS, or 16AS. In some embodiments, the sense strand comprises pattern 71S and the antisense strand comprises pattern 1AS, 2AS, 3AS, 4AS, 5AS, 6AS, 7AS, 8AS, 9AS, 10AS, 11 AS, 12AS, 13AS, 14AS, 15AS, or 16AS. In some embodiments, the sense strand comprises pattern 72S and the antisense strand comprises pattern 1AS, 2AS, 3AS, 4AS, 5AS, 6AS, 7AS, 8AS, 9AS, 10AS, 11 AS, 12AS, 13AS, 14AS, 15AS, or 16AS. In some embodiments, the sense strand comprises pattern 73S and the antisense strand comprises pattern 1AS, 2AS, 3AS, 4AS, 5AS, 6AS, 7AS, 8AS, 9AS, 10AS, 11 AS, 12AS, 13AS, 14AS, 15AS, or 16AS.

[0146] In some embodiments, the sense strand comprises pattern 1S, 2S, 3S, 4S, 5S, 6S, 7S, 8S, 9S, 10S, 11S, 12S, 13S, 14S, 15S, 16S, 17S, 18S, 19S, 20S, 21S, 22S, 23S, 24S, 25S, 26S, 27S, 28S, 29S, 30S, 31S, 32S, 33S, 34S, 35S, 36S, 37S, 38S, 39S, 40S, 41S, 42S, 43S, 44S, 45S, 46S, 47S, 48S, 49S, 50S, 51S, 52S, 53S, 54S, 55S, 56S, 57S, 58S, 59S, 60S, 61S, 62S, 63S, 64S, 65S, 66S, 67S, 68S, 69S, 70S, 71S, 72S, or 73S and the antisense strand comprises pattern 1AS. In some embodiments, the sense strand comprises pattern 1S, 2S, 3S, 4S, 5S, 6S, 7S, 8S, 9S, 10S, 11S, 12S, 13S, 14S, 15S, 16S, 17S, 18S, 19S, 20S, 21S, 22S, 23S, 24S, 25S, 26S, 27S, 28S, 29S, 30S, 31S, 32S, 33S, 34S, 35S, 36S, 37S, 38S, 39S, 40S, 41S, 42S, 43S, 44S, 45S, 46S, 47S, 48S, 49S, 50S, 51S, 52S, 53S, 54S, 55S, 56S, 57S, 58S, 59S, 60S, 61S, 62S, 63S, 64S, 65S, 66S, 67S, 68S, 69S, 70S, 71S, 72S, or 73S and the antisense strand comprises pattern 2AS. In some embodiments, the sense strand comprises pattern 1S, 2S, 3S, 4S, 5S, 6S, 7S, 8S, 9S, 10S, 11S, 12S, 13S, 14S, 15S, 16S, 17S, 18S, 19S, 20S, 21S, 22S, 23S, 24S, 25S, 26S, 27S, 28S, 29S, 30S, 31S, 32S, 33S, 34S, 35S, 36S, 37S, 38S, 39S, 40S, 41S, 42S, 43S, 44S, 45S, 46S, 47S, 48S, 49S, 50S, 51S, 52S, 53S, 54S, 55S, 56S, 57S, 58S, 59S, 60S, 61S, 62S, 63S, 64S, 65S, 66S, 67S, 68S, 69S, 70S, 71S, 72S, or 73S and the antisense strand comprises pattern 3AS. In some embodiments, the sense strand comprises pattern 1S, 2S, 3S, 4S, 5S, 6S, 7S, 8S, 9S, 10S, 11S, 12S, 13S, 14S, 15S, 16S, 17S, 18S, 19S, 20S, 21S, 22S, 23S, 24S, 25S, 26S, 27S, 28S, 29S, 30S, 31S, 32S, 33S, 34S, 35S, 36S, 37S, 38S, 39S, 40S, 41S, 42S, 43S, 44S, 45S, 46S, 47S, 48S, 49S, 50S, 51S, 52S, 53S, 54S, 55S, 56S, 57S, 58S, 59S, 60S, 61S, 62S, 63S, 64S, 65S, 66S, 67S, 68S, 69S, 70S, 71S, 72S, or 73S and the antisense strand comprises pattern 4AS. In some embodiments, the sense strand comprises pattern 1S, 2S, 3S, 4S, 5S, 6S, 7S, 8S, 9S, 10S, 11S, 12S, 13S, 14S, 15S, 16S, 17S, 18S, 19S, 20S, 21S, 22S, 23S, 24S, 25S, 26S, 27S, 28S, 29S, 30S, 31S, 32S, 33S, 34S, 35S, 36S, 37S, 38S, 39S, 40S, 41S, 42S, 43S, 44S, 45S, 46S, 47S, 48S, 49S, 50S, 51S, 52S, 53S, 54S, 55S, 56S, 57S, 58S, 59S, 60S, 61S, 62S, 63S, 64S, 65S, 66S, 67S, 68S, 69S, 70S, 71S, 72S, or 73S and the antisense strand comprises pattern 5AS. In some embodiments, the sense strand comprises pattern 1S, 2S, 3S, 4S, 5S, 6S, 7S, 8S, 9S, 10S, 11S, 12S, 13S, 14S, 15S, 16S, 17S, 18S, 19S, 20S, 21S, 22S, 23S, 24S, 25S, 26S, 27S, 28S, 29S, 30S, 31S, 32S, 33S, 34S, 35S, 36S, 37S, 38S, 39S, 40S, 41S, 42S, 43S, 44S, 45S, 46S, 47S, 48S, 49S, 50S, 51S, 52S, 53S, 54S, 55S, 56S, 57S, 58S, 59S, 60S, 61S, 62S, 63S, 64S, 65S, 66S, 67S, 68S, 69S, 70S, 71S, 72S, or 73S and the antisense strand comprises pattern 6AS. In some embodiments, the sense strand comprises pattern 1S, 2S, 3S, 4S, 5S, 6S, 7S, 8S, 9S, 10S, 1S, 12S, 13S, 14S, 15S, 16S, 17S, 18S, 19S, 20S, 21S, 22S, 23S, 24S, 25S, 26S, 27S, 28S, 29S, 30S, 31S, 32S, 33S, 34S, 35S, 36S, 37S, 38S, 39S, 40S, 41S, 42S, 43S, 44S, 45S, 46S, 47S, 48S, 49S, 50S, 51S, 52S, 53S, 54S, 55S, 56S, 57S, 58S, 59S, 60S, 61S, 62S, 63S, 64S, 65S, 66S, 67S, 68S, 69S, 70S, 71S, 72S, or 73S and the antisense strand comprises pattern 7AS. In some embodiments, the sense strand comprises pattern 1S, 2S, 3S, 4S, 5S, 6S, 7S, 8S, 9S, 10S, 11S, 12S, 13S, 14S, 15S, 16S, 17S, 18S, 19S, 20S, 21S, 22S, 23S, 24S, 25S, 26S, 27S, 28S, 29S, 30S, 31S, 32S, 33S, 34S, 35S, 36S, 37S, 38S, 39S, 40S, 41S, 42S, 43S, 44S, 45S, 46S, 47S, 48S, 49S, 50S, 51S, 52S, 53S, 54S, 55S, 56S, 57S, 58S, 59S, 60S, 61S, 62S, 63S, 64S, 65S, 66S, 67S, 68S, 69S, 70S, 71S, 72S, or 73S and the antisense strand comprises pattern 8AS. In some embodiments, the sense strand comprises pattern 1S, 2S, 3S, 4S, 5S, 6S, 7S, 8S, 9S, 10S, 11S, 12S, 13S, 14S, 15S, 16S, 17S, 18S, 19S, 20S, 21S, 22S, 23S, 24S, 25S, 26S, 27S, 28S, 29S, 30S, 31S, 32S, 33S, 34S, 35S, 36S, 37S, 38S, 39S, 40S, 41S, 42S, 43S, 44S, 45S, 46S, 47S, 48S, 49S, 50S, 51S, 52S, 53S, 54S, 55S, 56S, 57S, 58S, 59S, 60S, 61S, 62S, 63S, 64S, 65S, 66S, 67S, 68S, 69S, 70S, 71S, 72S, or 73S and the antisense strand comprises pattern 9AS. In some embodiments, the sense strand comprises pattern 1S, 2S, 3S, 4S, 5S, 6S, 7S, 8S, 9S, 10S, 11S, 12S, 13S, 14S, 15S, 16S, 17S, 18S, 19S, 20S, 21S, 22S, 23S, 24S, 25S, 26S, 27S, 28S, 29S, 30S, 31S, 32S, 33S, 34S, 35S, 36S, 37S, 38S, 39S, 40S, 41S, 42S, 43S, 44S, 45S, 46S, 47S, 48S, 49S, 50S, 51S, 52S, 53S, 54S, 55S, 56S, 57S, 58S, 59S, 60S, 61S, 62S, 63S, 64S, 65S, 66S, 67S, 68S, 69S, 70S, 71S, 72S, or 73S and the antisense strand comprises pattern 10AS. In some embodiments, the sense strand comprises pattern 1S, 2S, 3S, 4S, 5S, 6S, 7S, 8S, 9S, 10S, 11S, 12S, 13S, 14S, 15S, 16S, 17S, 18S, 19S, 20S, 21S, 22S, 23S, 24S, 25S, 26S, 27S, 28S, 29S, 30S, 31S, 32S, 33S, 34S, 35S, 36S, 37S, 38S, 39S, 40S, 41S, 42S, 43S, 44S, 45S, 46S, 47S, 48S, 49S, 50S, 51S, 52S, 53S, 54S, 55S, 56S, 57S, 58S, 59S, 60S, 61S, 62S, 63S, 64S, 65S, 66S, 67S, 68S, 69S, 70S, 71S, 72S, or 73S and the antisense strand comprises pattern 11 AS. In some embodiments, the sense strand comprises pattern 1S, 2S, 3S, 4S, 5S, 6S, 7S, 8S, 9S, 10S, 11S, 12S, 13S, 14S, 15S, 16S, 17S, 18S, 19S, 20S, 21S, 22S, 23S, 24S, 25S, 26S, 27S, 28S, 29S, 30S, 31S, 32S, 33S, 34S, 35S, 36S, 37S, 38S, 39S, 40S, 41S, 42S, 43S, 44S, 45S, 46S, 47S, 48S, 49S, 50S, 51S, 52S, 53S, 54S, 55S, 56S, 57S, 58S, 59S, 60S, 61S, 62S, 63S, 64S, 65S, 66S, 67S, 68S, 69S, 70S, 71S, 72S, or 73S and the antisense strand comprises pattern 12AS. In some embodiments, the sense strand comprises pattern 1S, 2S, 3S, 4S, 5S, 6S, 7S, 8S, 9S, 10S, 11S, 12S, 13S, 14S, 15S, 16S, 17S, 18S, 19S, 20S, 21S, 22S, 23S, 24S, 25S, 26S, 27S, 28S, 29S, 30S, 31S, 32S, 33S, 34S, 35S, 36S, 37S, 38S, 39S, 40S, 41S, 42S, 43S, 44S, 45S, 46S, 47S, 48S, 49S, 50S, 51S, 52S, 53S, 54S, 55S, 56S, 57S, 58S, 59S, 60S, 61S, 62S, 63S, 64S, 65S, 66S, 67S, 68S, 69S, 70S, 71S, 72S, or 73S and the antisense strand comprises pattern 13AS. In some embodiments, the sense strand comprises pattern 1S, 2S, 3S, 4S, 5S, 6S, 7S, 8S, 9S, 10S, 11S, 12S, 13S, 14S, 15S, 16S, 17S, 18S, 19S, 20S, 21S, 22S, 23S, 24S, 25S, 26S, 27S, 28S, 29S, 30S, 31S, 32S, 33S, 34S, 35S, 36S, 37S, 38S, 39S, 40S, 41S, 42S, 43S, 44S, 45S, 46S, 47S, 48S, 49S, 50S, 51S, 52S, 53S, 54S, 55S, 56S, 57S, 58S, 59S, 60S, 61S, 62S, 63S, 64S, 65S, 66S, 67S, 68S, 69S, 70S, 71S, 72S, or 73S and the antisense strand comprises pattern 14AS. In some embodiments, the sense strand comprises pattern 1S, 2S, 3S, 4S, 5S, 6S, 7S, 8S, 9S, 10S, 11S, 12S, 13S, 14S, 15S, 16S, 17S, 18S, 19S, 20S, 21S, 22S, 23S, 24S, 25S, 26S, 27S, 28S, 29S, 30S, 31S, 32S, 33S, 34S, 35S, 36S, 37S, 38S, 39S, 40S, 41S, 42S, 43S, 44S, 45S, 46S, 47S, 48S, 49S, 50S, 51S, 52S, 53S, 54S, 55S, 56S, 57S, 58S, 59S, 60S, 61S, 62S, 63S, 64S, 65S, 66S, 67S, 68S, 69S, 70S, 71S, 72S, or 73S and the antisense strand comprises pattern 15AS. In some embodiments, the sense strand comprises pattern 1S, 2S, 3S, 4S, 5S, 6S, 7S, 8S, 9S, 10S, 11S, 12S, 13S, 14S, 15S, 16S, 17S, 18S, 19S, 20S, 21S, 22S, 23S, 24S, 25S, 26S, 27S, 28S, 29S, 30S, 31S, 32S, 33S, 34S, 35S, 36S, 37S, 38S, 39S, 40S, 41S, 42S, 43S, 44S, 45S, 46S, 47S, 48S, 49S, 50S, 51S, 52S, 53S, 54S, 55S, 56S, 57S, 58S, 59S, 60S, 61S, 62S, 63S, 64S, 65S, 66S, 67S, 68S, 69S, 70S, 71S, 72S, or 73S and the antisense strand comprises pattern 16AS.

[0147] In some embodiments, the sense strand comprises modification pattern 1AS, 2AS, 3AS, 4AS, 5AS, 6AS, 7AS, 8AS, 9AS, 10AS, 11 AS, 12AS, 13AS, 14AS, 15AS, or 16AS. In some embodiments, the antisense strand comprises modification pattern 1S, 2S, 3S, 4S, 5S, 6S, 7S, 8S, 9S, 10S, 11S, 12S, 13S, 14S, 15S, 16S, 17S, 18S, 19S, 20S, 21S, 22S, 23S, 24S, 25S, 26S, 27S, 28S, 29S, 30S, 31S, 32S, 33S, 34S, 35S, 36S, 37S, 38S, 39S, 40S, 41S, 42S, 43S, 44S, 45S, 46S, 47S, 48S, 49S, 50S, 51S, 52S, 53S, 54S, 55S, 56S, 57S, 58S, 59S, 60S, 61S, 62S, 63S, 64S, 65S, 66S, 67S, 68S, 69S, 70S, 71S, 72S, or 73S. In some embodiments, the sense strand or the antisense strand comprises modification pattern ASO1.

[0148] In some embodiments, purines of the sense strand comprise 2′ fluoro modified purines. In some embodiments, purines of the sense strand comprise 2′-O-methyl modified purines. In some embodiments, purines of the sense strand comprise a mixture of 2′ fluoro and 2′-O-methyl modified purines. In some embodiments, all purines of the sense strand comprise 2′ fluoro modified purines. In some embodiments, all purines of the sense strand comprise 2′-O-methyl modified purines. In some embodiments, all purines of the sense strand comprise a mixture of 2′ fluoro and 2′-O-methyl modified purines.

[0149] In some embodiments, pyrimidines of the sense strand comprise 2′ fluoro modified pyrimidines. In some embodiments, pyrimidines of the sense strand comprise 2′-O-methyl modified pyrimidines. In some embodiments, pyrimidines of the sense strand comprise a mixture of 2′ fluoro and 2′-O-methyl modified pyrimidines. In some embodiments, all pyrimidines of the sense strand comprise 2′ fluoro modified pyrimidines. In some embodiments, all pyrimidines of the sense strand comprise 2′-O-methyl modified pyrimidines. In some embodiments, all pyrimidines of the sense strand comprise a mixture of 2′ fluoro and 2′-O-methyl modified pyrimidines.

[0150] In some embodiments, purines of the sense strand comprise 2′ fluoro modified purines, and pyrimidines of the sense strand comprise a mixture of 2′ fluoro and 2′-O-methyl modified pyrimidines. In some embodiments, purines of the sense strand comprise 2′-O-methyl modified purines, and pyrimidines of the sense strand comprise a mixture of 2′ fluoro and 2′-O-methyl modified pyrimidines. In some embodiments, purines of the sense strand comprise 2′ fluoro modified purines, and pyrimidines of the sense strand comprise 2′-O-methyl modified pyrimidines. In some embodiments, purines of the sense strand comprise 2′-O-methyl modified purines, and pyrimidines of the sense strand comprise 2′ fluoro modified pyrimidines. In some embodiments, pyrimidines of the sense strand comprise 2′ fluoro modified pyrimidines, and purines of the sense strand comprise a mixture of 2′ fluoro and 2′-O-methyl modified purines. In some embodiments, pyrimidines of the sense strand comprise 2′-O-methyl modified pyrimidines, and purines of the sense strand comprise a mixture of 2′ fluoro and 2′-O-methyl modified purines. In some embodiments, pyrimidines of the sense strand comprise 2′ fluoro modified pyrimidines, and purines of the sense strand comprise 2′-O-methyl modified purines. In some embodiments, pyrimidines of the sense strand comprise 2′-O-methyl modified pyrimidines, and purines of the sense strand comprise 2′ fluoro modified purines.

[0151] In some embodiments, all purines of the sense strand comprise 2′ fluoro modified purines, and all pyrimidines of the sense strand comprise a mixture of 2′ fluoro and 2′-O-methyl modified pyrimidines. In some embodiments, all purines of the sense strand comprise 2′-O-methyl modified purines, and all pyrimidines of the sense strand comprise a mixture of 2′ fluoro and 2′-O-methyl modified pyrimidines. In some embodiments, all purines of the sense strand comprise 2′ fluoro modified purines, and all pyrimidines of the sense strand comprise 2′-O-methyl modified pyrimidines. In some embodiments, all purines of the sense strand comprise 2′-O-methyl modified purines, and all pyrimidines of the sense strand comprise 2′ fluoro modified pyrimidines. In some embodiments, all pyrimidines of the sense strand comprise 2′ fluoro modified pyrimidines, and all purines of the sense strand comprise a mixture of 2′ fluoro and 2′-O-methyl modified purines. In some embodiments, all pyrimidines of the sense strand comprise 2′-O-methyl modified pyrimidines, and all purines of the sense strand comprise a mixture of 2′ fluoro and 2′-O-methyl modified purines. In some embodiments, all pyrimidines of the sense strand comprise 2′ fluoro modified pyrimidines, and all purines of the sense strand comprise 2′-O-methyl modified purines. In some embodiments, all pyrimidines of the sense strand comprise 2′-O-methyl modified pyrimidines, and all purines of the sense strand comprise 2′ fluoro modified purines.

[0152] In some embodiments, purines of the antisense strand comprise 2′ fluoro modified purines. In some embodiments, purines of the antisense strand comprise 2′-O-methyl modified purines. In some embodiments, purines of the antisense strand comprise a mixture of 2′ fluoro and 2′-O-methyl modified purines. In some embodiments, all purines of the antisense strand comprise 2′ fluoro modified purines. In some embodiments, all purines of the antisense strand comprise 2′-O-methyl modified purines. In some embodiments, all purines of the antisense strand comprise a mixture of 2′ fluoro and 2′-O-methyl modified purines.

[0153] In some embodiments, pyrimidines of the antisense strand comprise 2′ fluoro modified pyrimidines. In some embodiments, pyrimidines of the antisense strand comprise 2′-O-methyl modified pyrimidines. In some embodiments, pyrimidines of the antisense strand comprise a mixture of 2′ fluoro and 2′-O-methyl modified pyrimidines. In some embodiments, all pyrimidines of the antisense strand comprise 2′ fluoro modified pyrimidines. In some embodiments, all pyrimidines of the antisense strand comprise 2′-O-methyl modified pyrimidines. In some embodiments, all pyrimidines of the antisense strand comprise a mixture of 2′ fluoro and 2′-O-methyl modified pyrimidines.

[0154] In some embodiments, purines of the antisense strand comprise 2′ fluoro modified purines, and pyrimidines of the antisense strand comprise a mixture of 2′ fluoro and 2′-O-methyl modified pyrimidines. In some embodiments, purines of the antisense strand comprise 2′-O-methyl modified purines, and pyrimidines of the antisense strand comprise a mixture of 2′ fluoro and 2′-O-methyl modified pyrimidines. In some embodiments, purines of the antisense strand comprise 2′ fluoro modified purines, and pyrimidines of the antisense strand comprise 2′-O-methyl modified pyrimidines. In some embodiments, purines of the antisense strand comprise 2′-O-methyl modified purines, and pyrimidines of the antisense strand comprise 2′ fluoro modified pyrimidines. In some embodiments, pyrimidines of the antisense strand comprise 2′ fluoro modified pyrimidines, and purines of the antisense strand comprise a mixture of 2′ fluoro and 2′-O-methyl modified purines. In some embodiments, pyrimidines of the antisense strand comprise 2′-O-methyl modified pyrimidines, and purines of the antisense strand comprise a mixture of 2′ fluoro and 2′-O-methyl modified purines. In some embodiments, pyrimidines of the antisense strand comprise 2′ fluoro modified pyrimidines, and purines of the antisense strand comprise 2′-O-methyl modified purines. In some embodiments, pyrimidines of the antisense strand comprise 2′-O-methyl modified pyrimidines, and purines of the antisense strand comprise 2′ fluoro modified purines.

[0155] In some embodiments, all purines of the antisense strand comprise 2′ fluoro modified purines, and all pyrimidines of the antisense strand comprise a mixture of 2′ fluoro and 2′-O-methyl modified pyrimidines. In some embodiments, all purines of the antisense strand comprise 2′-O-methyl modified purines, and all pyrimidines of the antisense strand comprise a mixture of 2′ fluoro and 2′-O-methyl modified pyrimidines. In some embodiments, all purines of the antisense strand comprise 2′ fluoro modified purines, and all pyrimidines of the antisense strand comprise 2′-O-methyl modified pyrimidines. In some embodiments, all purines of the antisense strand comprise 2′-O-methyl modified purines, and all pyrimidines of the antisense strand comprise 2′ fluoro modified pyrimidines. In some embodiments, all pyrimidines of the antisense strand comprise 2′ fluoro modified pyrimidines, and all purines of the antisense strand comprise a mixture of 2′ fluoro and 2′-O-methyl modified purines. In some embodiments, all pyrimidines of the antisense strand comprise 2′-O-methyl modified pyrimidines, and all purines of the antisense strand comprise a mixture of 2′ fluoro and 2′-O-methyl modified purines. In some embodiments, all pyrimidines of the antisense strand comprise 2′ fluoro modified pyrimidines, and all purines of the antisense strand comprise 2′-O-methyl modified purines. In some embodiments, all pyrimidines of the antisense strand comprise 2′-O-methyl modified pyrimidines, and all purines of the antisense strand comprise 2′ fluoro modified purines.

[0156] In some embodiments, the siRNA comprises the sense strand and/or the antisense strand sequence of an siRNA in Table F, or a nucleic acid sequence thereof having 3 or 4 nucleoside substitutions, additions, or deletions. In some embodiments, the siRNA comprises the sense strand and/or the antisense strand sequence of an siRNA in Table F, or a nucleic acid sequence thereof having 1 or 2 nucleoside substitutions, additions, or deletions. In some embodiments, the siRNA comprises the sense strand and/or the antisense strand sequence of an siRNA in Table F. The siRNA may include the same internucleoside linkage modifications or nucleoside modifications as those in Table F. The siRNA may include any different internucleoside linkage modifications or nucleoside modifications different from those in Table F. The siRNA may include some unmodified internucleoside linkages or nucleosides.

[0157] In some embodiments, the siRNA comprises the sense strand and/or the antisense strand sequence of an siRNA of subset F, or a nucleic acid sequence thereof having 3 or 4 nucleoside substitutions, additions, or deletions. In some embodiments, the siRNA comprises the sense strand and/or the antisense strand sequence of an siRNA of subset F, or a nucleic acid sequence thereof having 1 or 2 nucleoside substitutions, additions, or deletions. In some embodiments, the siRNA comprises the sense strand and/or the antisense strand sequence of an siRNA of subset F. In some embodiments, the siRNA is cross-reactive with a non-human primate (NHP) HGFAC mRNA. The siRNA may include one or more internucleoside linkages and/or one or more nucleoside modifications.

[0158] In some embodiments, the siRNA comprises the sense strand and/or the antisense strand sequence of an siRNA in Table G(2), or a nucleic acid sequence thereof having 3 or 4 nucleoside substitutions, additions, or deletions. In some embodiments, the siRNA comprises the sense strand and/or the antisense strand sequence of an siRNA in Table G(2), or a nucleic acid sequence thereof having 1 or 2 nucleoside substitutions, additions, or deletions. In some embodiments, the siRNA comprises the sense strand and/or the antisense strand sequence of an siRNA in Table G(2). The siRNA may include the same internucleoside linkage modifications or nucleoside modifications as those in Table G(2). The siRNA may include any different internucleoside linkage modifications or nucleoside modifications different from those in Table G(2). The siRNA may include some unmodified internucleoside linkages or nucleosides.

[0159] In some embodiments, the siRNA comprises the sense strand and/or the antisense strand sequence of an siRNA in Table G(3), or a nucleic acid sequence thereof having 3 or 4 nucleoside substitutions, additions, or deletions. In some embodiments, the siRNA comprises the sense strand and/or the antisense strand sequence of an siRNA in Table G(3), or a nucleic acid sequence thereof having 1 or 2 nucleoside substitutions, additions, or deletions. In some embodiments, the siRNA comprises the sense strand and/or the antisense strand sequence of an siRNA in Table G(3). The siRNA may include the same internucleoside linkage modifications or nucleoside modifications as those in Table G(3). The siRNA may include any different internucleoside linkage modifications or nucleoside modifications different from those in Table G(3). The siRNA may include some unmodified internucleoside linkages or nucleosides.

[0160] In some embodiments, the siRNA comprises the sense strand and/or the antisense strand sequence of an siRNA in Table H(2)), or a nucleic acid sequence thereof having 3 or 4 nucleoside substitutions, additions, or deletions. In some embodiments, the siRNA comprises the sense strand and/or the antisense strand sequence of an siRNA in Table H(2)), or a nucleic acid sequence thereof having 1 or 2 nucleoside substitutions, additions, or deletions. In some embodiments, the siRNA comprises the sense strand and/or the antisense strand sequence of an siRNA in Table H(2)). The siRNA may include the same internucleoside linkage modifications or nucleoside modifications as those in Table H(2)). The siRNA may include any different internucleoside linkage modifications or nucleoside modifications different from those in Table H(2)). The siRNA may include some unmodified internucleoside linkages or nucleosides.

[0161] In some embodiments, the siRNA comprises the sense strand and/or the antisense strand sequence of an siRNA in Table 4, or a nucleic acid sequence thereof having 3 or 4 nucleoside substitutions, additions, or deletions. In some embodiments, the siRNA comprises the sense strand and/or the antisense strand sequence of an siRNA in Table 4, or a nucleic acid sequence thereof having 1 or 2 nucleoside substitutions, additions, or deletions. In some embodiments, the siRNA comprises the sense strand and/or the antisense strand sequence of an siRNA in Table 4. The siRNA may include the same internucleoside linkage modifications or nucleoside modifications as those in Table 4. The siRNA may include any different internucleoside linkage modifications or nucleoside modifications different from those in Table 4. The siRNA may include some unmodified internucleoside linkages or nucleosides.

[0162] In some embodiments, the siRNA comprises the sense strand and/or the antisense strand sequence of an siRNA in Table 10, or a nucleic acid sequence thereof having 3 or 4 nucleoside substitutions, additions, or deletions. In some embodiments, the siRNA comprises the sense strand and/or the antisense strand sequence of an siRNA in Table 10, or a nucleic acid sequence thereof having 1 or 2 nucleoside substitutions, additions, or deletions. In some embodiments, the siRNA comprises the sense strand and/or the antisense strand sequence of an siRNA in Table 10. The siRNA may include the same internucleoside linkage modifications or nucleoside modifications as those in Table 10. The siRNA may include any different internucleoside linkage modifications or nucleoside modifications different from those in Table 10. The siRNA may include some unmodified internucleoside linkages or nucleosides.

[0163] In some embodiments, the siRNA comprises the sense strand and/or the antisense strand sequence of an siRNA in Table 13, or a nucleic acid sequence thereof having 3 or 4 nucleoside substitutions, additions, or deletions. In some embodiments, the siRNA comprises the sense strand and/or the antisense strand sequence of an siRNA in Table 13, or a nucleic acid sequence thereof having 1 or 2 nucleoside substitutions, additions, or deletions. In some embodiments, the siRNA comprises the sense strand and/or the antisense strand sequence of an siRNA in Table 13. The siRNA may include the same internucleoside linkage modifications or nucleoside modifications as those in Table 13. The siRNA may include any different internucleoside linkage modifications or nucleoside modifications different from those in Table 13. The siRNA may include some unmodified internucleoside linkages or nucleosides.

[0164] Disclosed herein, in some embodiments, are modified oligonucleotides. The modified oligonucleotide may be an siRNA that includes modifications to the ribose rings, and phosphate linkages. The modifications may be in particular patterns that maximize cell delivery, stability, and efficiency. The siRNA may also include a vinyl phosphonate and a hydrophobic group. These modifications may aid in delivery to a cell or tissue within a subject. The modified oligonucleotide may be used in a method such as a treatment method or a method of reducing gene expression.

[0165] In some embodiments, the oligonucleotide comprises a duplex consisting of 21 nucleotide single strands with base pairing between 19 of the base pairs. In some embodiments, the duplex comprises single-stranded 2 nucleotide overhangs are at the 3′ ends of each strand. One strand (antisense strand) is complementary to a HGFAC mRNA. Each end of the antisense strand has one to two phosphorothioate bonds. The 5′ end has an optional phosphate mimic such as a vinyl phosphonate. In some embodiments, the oligonucleotide is used to knock down a HGFAC mRNA or a target protein. In some embodiments, the sense strand has the same sequence as the HGFAC mRNA. In some embodiments, there are 1-2 phosphorothioates at the 3′ end. In some embodiments, there are 1 or no phosphorothioates at the 5′ end. In some embodiments, there is a hydrophobic conjugate of 12 to 25 carbons attached at the 5′ end via a phosphodiester bond.

[0166] In some cases, the sense strand of any of the siRNAs comprises siRNA with a particular modification pattern. In some embodiments of the modification pattern, position 9 counting from the 5′ end of the sense strand may have a 2′F modification. In some embodiments, when position 9 of the sense strand is a pyrimidine, then all purines in the sense strand have a 2′OMe modification. In some embodiments, when position 9 is the only pyrimidine between positions 5 and 11 of the sense stand, then position 9 is the only position with a 2′F modification in the sense strand. In some embodiments, when position 9 and only one other base between positions 5 and 11 of the sense strand are pyrimidines, then both of these pyrimidines are the only two positions with a 2′F modification in the sense strand. In some embodiments, when position 9 and only two other bases between positions 5 and 11 of the sense strand are pyrimidines, and those two other pyrimidines are in adjacent positions so that there would be not three 2′F modifications in a row, then any combination of 2′F modifications can be made that give three 2′F modifications in total. In some embodiments, when there are more than 2 pyrimidines between positions 5 and 11 of the sense strand, then all combinations of pyrimidines having the 2′F modification are allowed that have three to five 2′F modifications in total, provided that the sense strand does not have three 2′F modifications in a row. In some cases, the sense strand of any of the siRNAs comprises a modification pattern which conforms to any or all of these sense strand rules.

[0167] In some embodiments, when position 9 of the sense strand is a purine, then all purines in the sense strand have a 2′OMe modification. In some embodiments, when position 9 is the only purine between positions 5 and 11 of the sense stand, then position 9 is the only position with a 2′F modification in the sense strand. In some embodiments, when position 9 and only one other base between positions 5 and 11 of the sense strand are purines, then both of these purines are the only two positions with a 2′F modification in the sense strand. In some embodiments, when position 9 and only two other bases between positions 5 and 11 of the sense strand are purines, and those two other purines are in adjacent positions so that there would be not three 2′F modifications in a row, then any combination of 2′F modifications can be made that give three 2′F modifications in total. In some embodiments, when there are more than 2 purines between positions 5 and 11 of the sense strand, then all combinations of purines having the 2′F modification are allowed that have three to five 2′F modifications in total, provided that the sense strand does not have three 2′F modifications in a row. In some cases, the sense strand of any of the siRNAs comprises a modification pattern which conforms to any or all of these sense strand rules.

[0168] In some cases, position 9 of the sense strand can be a 2′deoxy. In these cases, 2′F and 2′OMe modifications may occur at the other positions of the sense strand. In some cases, the sense strand of any of the siRNAs comprises a modification pattern which conforms to these sense strand rules.

[0169] In some cases, the sense strand of any of the siRNAs comprises a modification pattern which conforms to these sense strand rules.

[0170] Disclosed herein, in some embodiments are compositions comprising an oligonucleotide that targets HGFAC and when administered to a cell decreases expression of HGFAC, wherein the oligonucleotide comprises a small interfering RNA (siRNA) comprising a sense strand and an antisense strand, wherein the sense strand comprises a sense strand sequence described herein in which at least one internucleoside linkage is modified and at least one nucleoside is modified, or an sense strand sequence comprising 1 or 2 nucleoside substitutions, additions, or deletions of the oligonucleotide sequence in which at least one internucleoside linkage is modified and at least one nucleoside is modified, and wherein the antisense strand comprises an antisense strand sequence described herein in which at least one internucleoside linkage is modified and at least one nucleoside is modified, or an oligonucleotide sequence comprising 1 or 2 nucleoside substitutions, additions, or deletions of the antisense strand sequence in which at least one internucleoside linkage is modified and at least one nucleoside is modified.

[0171] Some embodiments relate to methods that include administering the composition to a subject.

[0172] In some embodiments, the siRNA comprises the sense strand comprising any one of SEQ ID NO: 4804-4813, or a nucleic acid sequence thereof having 3 or 4 nucleoside substitutions, additions, or deletions. In some embodiments, the siRNA comprises the sense strand comprising any one of SEQ ID NO: 4804-4813, or a nucleic acid sequence thereof having 1 or 2 nucleoside substitutions, additions, or deletions. In some embodiments, the siRNA comprises the sense strand comprising any one of SEQ ID NO: 4804-4813. The siRNA may include the same internucleoside linkage modifications or nucleoside modifications as any one of SEQ ID NO: 4804-4813. The siRNA may include any different internucleoside linkage modifications or nucleoside modifications different from any one of SEQ ID NO: 4804-4813. The siRNA may include some unmodified internucleoside linkages or nucleosides.

[0173] In some embodiments, the siRNA comprises the antisense strand comprising any one of SEQ ID NO: 4814-4821, or a nucleic acid sequence thereof having 3 or 4 nucleoside substitutions, additions, or deletions. In some embodiments, the siRNA comprises the antisense strand comprising any one of SEQ ID NO: 4814-4821, or a nucleic acid sequence thereof having 1 or 2 nucleoside substitutions, additions, or deletions. In some embodiments, the siRNA comprises the antisense strand comprising any one of SEQ ID NO: 4814-4821. The siRNA may include the same internucleoside linkage modifications or nucleoside modifications as any one of SEQ ID NO: 4814-4821. The siRNA may include any different internucleoside linkage modifications or nucleoside modifications different from any one of SEQ ID NO: 4814-4821. The siRNA may include some unmodified internucleoside linkages or nucleosides.

### 4. Modified ASOs

[0174] In some embodiments, the composition comprises an oligonucleotide that inhibits the expression of HGFAC, wherein the oligonucleotide comprises an antisense oligonucleotide (ASO). In some embodiments, the ASO comprises modification pattern ASO1: 5′-nsnsnsnsnsdNsdNsdNsdNsdNsdNsdNsdNsdNsdNsnsnsnsnsn-3′, wherein “dN” is any deoxynucleotide, “n” is a 2′O-methyl or 2′O-methoxyethyl-modified nucleoside, and “s” is a phosphorothioate linkage. In some embodiments, the ASO comprises modification pattern 1S, 2S, 3S, 4S, 5S, 6S, 7S, 8S, 9S, 10S, 11S, 12S, 13S, 14S, 15S, 16S, 17S, 18S, 19S, 20S, 21S, 22S, 23S, 24S, 25S, 26S, 27S, 28S, 29S, 30S, 31S, 32S, 33S, 34S, 35S, 36S, 37S, 38S, 39S, 40S, 41S, 42S, 43S, 44S, 45S, 46S, 47S, 48S, 49S, 50S, 51S, 52S, 53S, 54S, 55S, 56S, 57S, 58S, 59S, 60S, 61S, 62S, 63S, 64S, 65S, 66S, 67S, 68S, 69S, 70S, 71S, 72S, 73S, 1AS, 2AS, 3AS, 4AS, 5AS, 6AS, 7AS, 8AS, 9AS, 10AS, 11AS, 12AS, 13AS, 14AS, 15AS, or 16AS.

### D. Formulations

[0175] In some embodiments, the composition is a pharmaceutical composition. In some embodiments, the composition is sterile. In some embodiments, the composition further comprises a pharmaceutically acceptable carrier.

[0176] In some embodiments, the pharmaceutically acceptable carrier comprises water. In some embodiments, the pharmaceutically acceptable carrier comprises a buffer. In some embodiments, the pharmaceutically acceptable carrier comprises a saline solution. In some embodiments, the pharmaceutically acceptable carrier comprises water, a buffer, or a saline solution. In some embodiments, the composition comprises a liposome. In some embodiments, the pharmaceutically acceptable carrier comprises liposomes, lipids, nanoparticles, proteins, protein-antibody complexes, peptides, cellulose, nanogel, or a combination thereof.

### II. Methods and Uses

[0177] Disclosed herein, in some embodiments, are methods of administering a composition described herein to a subject. Some embodiments relate to use a composition described herein, such as administering the composition to a subject.

[0178] Some embodiments relate to a method of treating a disorder in a subject in need thereof. Some embodiments relate to use of a composition described herein in the method of treatment. Some embodiments include administering a composition described herein to a subject with the disorder. In some embodiments, the administration treats the disorder in the subject. In some embodiments, the composition treats the disorder in the subject. The disorder may comprise cancer.

[0179] In some embodiments, the treatment comprises prevention, inhibition, or reversion of the disorder in the subject. Some embodiments relate to use of a composition described herein in the method of preventing, inhibiting, or reversing the disorder. Some embodiments relate to a method of preventing, inhibiting, or reversing a disorder a disorder in a subject in need thereof. Some embodiments include administering a composition described herein to a subject with the disorder. In some embodiments, the administration prevents, inhibits, or reverses the disorder in the subject. In some embodiments, the composition prevents, inhibits, or reverses the disorder in the subject.

[0180] Some embodiments relate to a method of preventing a disorder a disorder in a subject in need thereof. Some embodiments relate to use of a composition described herein in the method of preventing the disorder. Some embodiments include administering a composition described herein to a subject with the disorder. In some embodiments, the administration prevents the disorder in the subject. In some embodiments, the composition prevents the disorder in the subject.

[0181] Some embodiments relate to a method of inhibiting a disorder a disorder in a subject in need thereof. Some embodiments relate to use of a composition described herein in the method of inhibiting the disorder. Some embodiments include administering a composition described herein to a subject with the disorder. In some embodiments, the administration inhibits the disorder in the subject. In some embodiments, the composition inhibits the disorder in the subject.

[0182] Some embodiments relate to a method of reversing a disorder a disorder in a subject in need thereof. Some embodiments relate to use of a composition described herein in the method of reversing the disorder. Some embodiments include administering a composition described herein to a subject with the disorder. In some embodiments, the administration reverses the disorder in the subject. In some embodiments, the composition reverses the disorder in the subject.

[0183] In some embodiments, the administration is systemic. In some embodiments, the administration is intravenous. In some embodiments, the administration is by injection.

[0184] In some embodiments, the subject is administered the HGFAC inhibitor described herein as part of a combined treatment with another therapy. In some embodiments, the combination therapy includes a checkpoint inhibitor. In some embodiments, the checkpoint inhibitor includes as a PDL1 inhibitor. In some embodiments, the checkpoint inhibitor includes a PD1 inhibitor. In some embodiments, the checkpoint inhibitor includes a CTLA4 inhibitor. In some embodiments, the PDL1 inhibitor comprises atezolizumab, avelumab, durvalumab, KN035, CK-301, AUNP12, CA-170, BMS-986189, or a combination thereof. In some embodiments, the PD-1 inhibitor comprises nivolumab, pembrolizumab, cemiplimab, dorstarlimab, JTX-4014, spartalizumab (PDR001), camrelizumab (SHR1210), sintilmab (1B1308), tislelizumab (BGB-A317), toripalimab (JS 001), INCMGA00012 (MGA012), AMP-224, AMP-514, or combinations thereof. In some embodiments, the CTLA4 inhibitor comprises Ipilimumab (Yervoy), tremelimumab (Imjuno), or combinations thereof. In some embodiments, the HGFAC inhibitor and the checkpoint inhibitor are administered at the same time. In some embodiments, the HGFAC inhibitor and the PDL1 inhibitor are administered simultaneously. In some embodiments, the HGFAC inhibitor and the PDL1 inhibitor are administered substantially simultaneously. In some embodiments, the HGFAC inhibitor and the PDL1 inhibitor are administered sequentially. In some embodiments, the HGFAC inhibitor and the PDL1 inhibitor are administered separately. In some embodiments, the combination therapy includes radiotherapy. In some embodiments, the HGFAC inhibitor and the radiotherapy are administered at the same time. In some embodiments, the HGFAC inhibitor and the radiotherapy are administered simultaneously. In some embodiments, the HGFAC inhibitor and the radiotherapy are administered substantially simultaneously. In some embodiments, the HGFAC inhibitor and the radiotherapy are administered sequentially. In some embodiments, the HGFAC inhibitor and the radiotherapy are administered separately.

### A. Cancers

[0185] Some embodiments of the methods described herein include treating a disorder such as cancer in a subject in need thereof. Non-limiting examples of cancer may include: malignant neoplasms, solid tumors, hematological cancers, malignant neoplasms of urinary tract, malignant neoplasms of thyroid and other endocrine glands, malignant neoplasms of soft tissue, malignant neoplasms of skin, malignant neoplasms of skeletal system, malignant neoplasms of respiratory and intrathoracic organs, malignant neoplasms of male genital organs, malignant neoplasms of female genital organs, malignant neoplasms of lip, oral cavity and pharynx, malignant neoplasms of eye, brain and other parts of central nervous system, malignant neoplasms of digestive system, malignant neoplasms of breast, malignant neoplasms of pancreas, malignant neoplasms of liver, or malignant melanoma. Any one of these cancers, or any grouping, may be treated by a method or composition described herein. In some embodiments, the method modulates an immune response that may affect the cancer. In some embodiments, the method increases an immune response against cancer.

### B. Subjects

[0186] Some embodiments of the methods described herein include treatment of a subject. Non-limiting examples of subjects include vertebrates, animals, mammals, dogs, cats, cattle, rodents, mice, rats, primates, monkeys, and humans. In some embodiments, the subject is a vertebrate. In some embodiments, the subject is an animal. In some embodiments, the subject is a mammal. In some embodiments, the subject is a dog. In some embodiments, the subject is a cat. In some embodiments, the subject is a cattle. In some embodiments, the subject is a mouse. In some embodiments, the subject is a rat. In some embodiments, the subject is a primate. In some embodiments, the subject is a monkey. In some embodiments, the subject is an animal, a mammal, a dog, a cat, cattle, a rodent, a mouse, a rat, a primate, or a monkey. In some embodiments, the subject is a human.

[0187] In some embodiments, the subject is male. In some embodiments, the subject is female.

[0188] In some embodiments, the subject is an adult (e.g., at least 18 years old). In some embodiments, the subject is ≥90 years of age. In some embodiments, the subject is ≥85 years of age. In some embodiments, the subject is ≥80 years of age. In some embodiments, the subject is ≥70 years of age. In some embodiments, the subject is ≥60 years of age. In some embodiments, the subject is ≥50 years of age. In some embodiments, the subject is ≥40 years of age. In some embodiments, the subject is ≥30 years of age. In some embodiments, the subject is ≥20 years of age. In some embodiments, the subject is ≥10 years of age. In some embodiments, the subject is ≥1 years of age. In some embodiments, the subject is ≥0 years of age.

[0189] In some embodiments, the subject is ≤100 years of age. In some embodiments, the subject is ≤90 years of age. In some embodiments, the subject is ≤85 years of age. In some embodiments, the subject is ≤80 years of age. In some embodiments, the subject is ≤70 years of age. In some embodiments, the subject is ≤60 years of age. In some embodiments, the subject is ≤50 years of age. In some embodiments, the subject is ≤40 years of age. In some embodiments, the subject is ≤30 years of age. In some embodiments, the subject is ≤20 years of age. In some embodiments, the subject is ≤10 years of age. In some embodiments, the subject is ≤1 years of age.

[0190] In some embodiments, the subject is between 0 and 100 years of age. In some embodiments, the subject is between 20 and 90 years of age. In some embodiments, the subject is between 30 and 80 years of age. In some embodiments, the subject is between 40 and 75 years of age. In some embodiments, the subject is between 50 and 70 years of age. In some embodiments, the subject is between 40 and 85 years of age.

### C. Baseline Measurements

[0191] Some embodiments of the methods described herein include obtaining a baseline measurement from a subject. For example, in some embodiments, a baseline measurement is obtained from the subject prior to treating the subject. Non-limiting examples of baseline measurements include a baseline clinical response measurement, a baseline cell count measurement, a baseline antibody level measurement, or a baseline tissue marker level measurement, a baseline HGFAC protein measurement, or a baseline HGFAC mRNA measurement.

[0192] In some embodiments, the baseline measurement is obtained directly from the subject. In some embodiments, the baseline measurement is obtained by observation, for example by observation of the subject or of the subject's tissue. In some embodiments, the baseline measurement is obtained noninvasively using an imaging device.

[0193] In some embodiments, the baseline measurement is obtained in a sample from the subject. In some embodiments, the baseline measurement is obtained in one or more histological tissue sections. In some embodiments, the baseline measurement is obtained by performing an assay such as an immunoassay, a colorimetric assay, or a fluorescence assay, on the sample obtained from the subject. In some embodiments, the baseline measurement is obtained by an immunoassay, a colorimetric assay, a fluorescence assay, or a chromatography (e.g., HPLC) assay. In some embodiments, the baseline measurement is obtained by PCR.

[0194] In some embodiments, the baseline measurement is a baseline clinical response measurement. Non-limiting examples of clinical response baseline measurements include: immune specific related response criteria (irRC) such as set forth in iRECIST, progression free survival (PFS), duration of response (DOR), disease control rate (DCR), health-related quality of life, milestone survival, clinical benefit rate, pathological complete response, complete response, objective response rate, duration of clinical benefit, time to next treatment, time to treatment failure, disease-free survival, or time to progression. In some embodiments, the baseline clinical response measurement is obtained through patient observation or patient response. In some embodiments, the baseline clinical response measurement is obtained by observation of a patient or discussion with a patient.

[0195] In some embodiments, the baseline measurement is a baseline cell count measurement. The baseline cell count measurement may include a baseline immune cell count measurement. Non-limiting examples of cell count baseline measurements may include: myeloid derived suppressor cell (MDSC) counts and subpopulations, CD8+ tumor infiltrating lymphocytes (TILs), leukocyte counts, T and B lymphocyte counts and activation states, monocyte counts, macrophage counts and activation states, dendritic cell counts, neutrophil counts, eosinophil counts, basophil counts, or mast cell counts. In some embodiments, the baseline cell count measurement is a baseline cell count concentration (for example, cells per liter). In some embodiments, the baseline cell count concentration is a baseline total cell count concentration. In some embodiments, the baseline cell count measurement is a baseline circulating cell count measurement. In some embodiments, the baseline cell count measurement is obtained by centrifuging a blood sample and measuring the sample in various concentrations.

[0196] In some embodiments, the baseline measurement is a baseline antibody level measurement. Non-limiting examples of cell count baseline measurements include: IgA levels, IgG levels, or IgM. In some embodiments, the baseline antibody level measurement is a baseline antibody level concentration (for example, mg/dL). In some embodiments, the baseline antibody measurement is a baseline circulating antibody measurement. In some embodiments, the baseline antibody measurement is obtained by an assay such as an immunoassay, a colorimetric assay, or a fluorescence assay.

[0197] In some embodiments, the baseline measurement is a baseline tumor marker level measurement. Non-limiting examples of cell count baseline measurements include levels of tumor markers such as CEA, PSA, CA 125, CA 15-3, CA 19-9, CA 27.29, CA 72-4, AFP, hCG, B2M, BTA, Calcitonin, CgA, CELLSEARCH, DCP, Gastrin, HE4, LDH, NSE, NMP22, or PAP. In some embodiments, the baseline tumor marker level measurement is a baseline tumor marker level concentration (for example, mg/dL). In some embodiments, the baseline tumor marker level concentration is a baseline total tumor marker level concentration. In some embodiments, the baseline tumor marker level measurement is a baseline circulating tumor marker level measurement. In some embodiments, the baseline tumor marker level measurement is obtained by a blood test, urine test, or biopsy.

[0198] In some embodiments, the baseline measurement is a baseline HGFAC protein measurement. In some embodiments, the baseline HGFAC protein measurement comprises a baseline HGFAC protein level. In some embodiments, the baseline HGFAC protein level is indicated as a mass or percentage of HGFAC protein per sample weight. In some embodiments, the baseline HGFAC protein level is indicated as a mass or percentage of HGFAC protein per sample volume. In some embodiments, the baseline HGFAC protein level is indicated as a mass or percentage of HGFAC protein per total protein within the sample. In some embodiments, the baseline HGFAC protein measurement is a baseline circulating/tissue HGFAC protein measurement. In some embodiments, the baseline HGFAC protein measurement is obtained by an assay such as an immunoassay, a colorimetric assay, or a fluorescence assay.

[0199] In some embodiments, the baseline measurement is a baseline HGFAC mRNA measurement. In some embodiments, the baseline HGFAC mRNA measurement comprises a baseline HGFAC mRNA level. In some embodiments, the baseline HGFAC mRNA level is indicated as an amount or percentage of HGFAC mRNA per sample weight. In some embodiments, the baseline HGFAC mRNA level is indicated as an amount or percentage of HGFAC mRNA per sample volume. In some embodiments, the baseline HGFAC mRNA level is indicated as an amount or percentage of HGFAC mRNA per total mRNA within the sample. In some embodiments, the baseline HGFAC mRNA level is indicated as an amount or percentage of HGFAC mRNA per total nucleic acids within the sample. In some embodiments, the baseline HGFAC mRNA level is indicated relative to another mRNA level, such as an mRNA level of a housekeeping gene, within the sample. In some embodiments, the baseline HGFAC mRNA measurement is a baseline tissue HGFAC mRNA measurement. In some embodiments, the baseline HGFAC mRNA measurement is obtained by an assay such as a polymerase chain reaction (PCR) assay. In some embodiments, the PCR comprises quantitative PCR (qPCR). In some embodiments, the PCR comprises reverse transcription of the HGFAC mRNA.

[0200] Some embodiments of the methods described herein include obtaining a sample from a subject. In some embodiments, the baseline measurement is obtained in a sample obtained from the subject. In some embodiments, the sample is obtained from the subject prior to administration or treatment of the subject with a composition described herein. In some embodiments, a baseline measurement is obtained in a sample obtained from the subject prior to administering the composition to the subject. In some embodiments, the sample is obtained from the subject in a fasted state. In some embodiments, the sample is obtained from the subject after an overnight fasting period. In some embodiments, the sample is obtained from the subject in a fed state.

[0201] In some embodiments, the sample comprises a fluid. In some embodiments, the sample is a fluid sample. In some embodiments, the sample is a blood, plasma, or serum sample. In some embodiments, the sample comprises blood. In some embodiments, the sample is a blood sample. In some embodiments, the sample is a whole-blood sample. In some embodiments, the blood is fractionated or centrifuged. In some embodiments, the sample comprises plasma. In some embodiments, the sample is a plasma sample. A blood sample may be a plasma sample. In some embodiments, the sample comprises serum. In some embodiments, the sample is a serum sample. A blood sample may be a serum sample.

[0202] In some embodiments, the sample comprises a tissue. In some embodiments, the sample is a tissue sample. In some embodiments, the tissue comprises liver or cancer tissue. For example, the baseline HGFAC mRNA measurement, or the baseline HGFAC protein measurement, may be obtained in a liver sample obtained from the patient. In some embodiments, the tissue comprises liver tissue. The liver may include hepatocytes. In some embodiments, the tissue comprises cancer tissue.

[0203] In some embodiments, the sample includes cells. In some embodiments, the sample comprises a cell. In some embodiments, the cell comprises a liver cell or a cancer cell. In some embodiments, the cell is a liver cell. In some embodiments, the liver cell is a hepatocyte. In some embodiments, the cell is a cancer cell.

### D. Effects

[0204] In some embodiments, the composition or administration of the composition affects a measurement such as a clinical response measurement, a cell count measurement, an antibody level measurement, a tumor marker level measurement, an HGFAC protein measurement, or an HGFAC mRNA measurement, relative to the baseline measurement.

[0205] Some embodiments of the methods described herein include obtaining the measurement from a subject. For example, the measurement may be obtained from the subject after treating the subject. In some embodiments, the measurement is obtained in a second sample (such as a fluid or tissue sample described herein) obtained from the subject after the composition is administered to the subject. In some embodiments, the measurement is an indication that the cancer has been treated.

[0206] In some embodiments, the measurement is obtained directly from the subject. In some embodiments, the measurement is obtained noninvasively using an imaging device. In some embodiments, the measurement is obtained in a second sample from the subject. In some embodiments, the measurement is obtained in one or more histological tissue sections. In some embodiments, the measurement is obtained by performing an assay on the second sample obtained from the subject. In some embodiments, the measurement is obtained by an assay, such as an assay described herein. In some embodiments, the assay is an immunoassay, a colorimetric assay, a fluorescence assay, a chromatography (e.g., HPLC) assay, or a PCR assay. In some embodiments, the measurement is obtained by an assay such as an immunoassay, a colorimetric assay, a fluorescence assay, or a chromatography (e.g., HPLC) assay.

[0207] In some embodiments, the measurement is obtained by PCR. In some embodiments, the measurement is obtained by histology. In some embodiments, the measurement is obtained by observation. In some embodiments, additional measurements are made, such as in a 3rd sample, a 4th sample, or a fifth sample.

[0208] In some embodiments, the measurement is obtained within 1 hour, within 2 hours, within 3 hours, within 4 hours, within 5 hours, within 6 hours, within 12 hours, within 18 hours, or within 24 hours after the administration of the composition. In some embodiments, the measurement is obtained within 1 day, within 2 days, within 3 days, within 4 days, within 5 days, within 6 days, or within 7 days after the administration of the composition. In some embodiments, the measurement is obtained within 1 week, within 2 weeks, within 3 weeks, within 1 month, within 2 months, within 3 months, within 6 months, within 1 year, within 2 years, within 3 years, within 4 years, or within 5 years after the administration of the composition. In some embodiments, the measurement is obtained after 1 hour, after 2 hours, after 3 hours, after 4 hours, after 5 hours, after 6 hours, after 12 hours, after 18 hours, or after 24 hours after the administration of the composition. In some embodiments, the measurement is obtained after 1 day, after 2 days, after 3 days, after 4 days, after 5 days, after 6 days, or after 7 days after the administration of the composition. In some embodiments, the measurement is obtained after 1 week, after 2 weeks, after 3 weeks, after 1 month, after 2 months, after 3 months, after 6 months, after 1 year, after 2 years, after 3 years, after 4 years, or after 5 years, following the administration of the composition.

[0209] In some embodiments, the composition reduces the measurement relative to the baseline measurement. For example, an adverse phenotype of cancer may be reduced upon administration of the composition. In some embodiments, the reduction is measured in a second sample obtained from the subject after administering the composition to the subject. In some embodiments, the reduction is measured directly in the subject after administering the composition to the subject. In some embodiments, the measurement is decreased by about 2.5% or more, about 5% or more, or about 7.5% or more, relative to the baseline measurement. In some embodiments, the measurement is decreased by about 10% or more, relative to the baseline measurement. In some embodiments, the measurement is decreased by about 20% or more, about 30% or more, about 40% or more, about 50% or more, about 60% or more, about 70% or more, about 80% or more, about 90% or more, relative to the baseline measurement. In some embodiments, the measurement is decreased by no more than about 2.5%, no more than about 5%, or no more than about 7.5%, relative to the baseline measurement. In some embodiments, the measurement is decreased by no more than about 10%, relative to the baseline measurement. In some embodiments, the measurement is decreased by no more than about 20%, no more than about 30%, no more than about 40%, no more than about 50%, no more than about 60%, no more than about 70%, no more than about 80%, no more than about 90%, or no more than about 100% relative to the baseline measurement. In some embodiments, the measurement is decreased by 2.5%, 5%, 7.5%, 10%, 20%, 30%, 40%, 50%, 60%, 70%, 80%, 90%, or 100%, or by a range defined by any of the two aforementioned percentages.

[0210] In some embodiments, the composition increases the measurement relative to the baseline measurement. For example, a protective cancer phenotype may be increased upon administration of the composition. In some embodiments, the increase is measured in a second sample obtained from the subject after administering the composition to the subject. In some embodiments, the increase is measured directly in the subject after administering the composition to the subject. In some embodiments, the measurement is increased by about 2.5% or more, about 5% or more, or about 7.5% or more, relative to the baseline measurement. In some embodiments, the measurement is increased by about 10% or more, relative to the baseline measurement. In some embodiments, the measurement is increased by about 20% or more, about 30% or more, about 40% or more, about 50% or more, about 60% or more, about 70% or more, about 80% or more, about 90% or more, relative to the baseline measurement. In some embodiments, the measurement is increased by about 100% or more, increased by about 250% or more, increased by about 500% or more, increased by about 750% or more, or increased by about 1000% or more, relative to the baseline measurement. In some embodiments, the measurement is increased by no more than about 2.5%, no more than about 5%, or no more than about 7.5%, relative to the baseline measurement. In some embodiments, the measurement is increased by no more than about 10%, relative to the baseline measurement. In some embodiments, the measurement is increased by no more than about 20%, no more than about 30%, no more than about 40%, no more than about 50%, no more than about 60%, no more than about 70%, no more than about 80%, no more than about 90%, or no more than about 100% relative to the baseline measurement. In some embodiments, the measurement is increased by no more than about 100%, increased by no more than about 250%, increased by no more than about 500%, increased by no more than about 750%, or increased by no more than about 1000%, relative to the baseline measurement. In some embodiments, the measurement is increased by 2.5%, 5%, 7.5%, 10%, 20%, 30%, 40%, 50%, 60%, 70%, 80%, 90%, 100%, 250%, 500%, 750%, or 1000%, or by a range defined by any of the two aforementioned percentages.

[0211] In some embodiments, the measurement is a clinical response measurement. The clinical response measurement may include a time. The clinical response measurement may include an amount. The clinical response measurement may include a rate. Non-limiting examples of clinical response measurements include: immune specific related response criteria (irRC) such as set forth in iRECIST, progression free survival (PFS), duration of response (DOR), disease control rate (DCR), health-related quality of life, milestone survival, clinical benefit rate, pathological complete response, complete response, objective response rate, duration of clinical benefit, time to next treatment, time to treatment failure, disease-free survival, or time to progression. In some embodiments, the clinical response measurement is obtained through patient observation or patient response. In some embodiments, the clinical response measurement is a circulating clinical response measurement. In some embodiments, the clinical response measurement is obtained by observation of a patient. The clinical response measurement may include irRC. The clinical response measurement may include PFS. The clinical response measurement may include DOR. The clinical response measurement may include DCR. The clinical response measurement may include health-related quality of life. The clinical response measurement may include milestone survival. The clinical response measurement may include clinical benefit rate. The clinical response measurement may include pathological complete response. The clinical response measurement may include complete response. The clinical response measurement may include objective response rate. The clinical response measurement may include duration of clinical benefit. The clinical response measurement may include time to next treatment. The clinical response measurement may include time to treatment failure. The clinical response measurement may include disease-free survival. The clinical response measurement may include time to progression.

[0212] In some embodiments, the composition increases the clinical response measurement relative to the baseline clinical response measurement. For example, a beneficial effect in the clinical response may be increased upon administration of the composition. In some embodiments, the clinical response measurement is measured in a second sample obtained from the subject after administering the composition to the subject. In some embodiments, the clinical response measurement is measured directly in the subject after administering the composition to the subject. In some embodiments, the clinical response measurement is increased by about 2.5% or more, about 5% or more, or about 7.5% or more, relative to the baseline measurement. In some embodiments, the clinical response measurement is increased by about 10% or more, relative to the baseline measurement. In some embodiments, the clinical response measurement is increased by about 20% or more, about 30% or more, about 40% or more, about 50% or more, about 60% or more, about 70% or more, about 80% or more, about 90% or more, relative to the baseline measurement. In some embodiments, the clinical response measurement is increased by about 100% or more, increased by about 250% or more, increased by about 500% or more, increased by about 750% or more, or increased by about 1000% or more, relative to the baseline measurement. In some embodiments, the clinical response measurement is increased by no more than about 2.5%, no more than about 5%, or no more than about 7.5%, relative to the baseline measurement. In some embodiments, the clinical response measurement is increased by no more than about 10%, relative to the baseline measurement. In some embodiments, the clinical response measurement is increased by no more than about 20%, no more than about 30%, no more than about 40%, no more than about 50%, no more than about 60%, no more than about 70%, no more than about 80%, no more than about 90%, or no more than about 100% relative to the baseline measurement. In some embodiments, the clinical response measurement is increased by no more than about 100%, increased by no more than about 250%, increased by no more than about 500%, increased by no more than about 750%, or increased by no more than about 1000%, relative to the baseline measurement. In some embodiments, the clinical response measurement is increased by 2.5%, 5%, 7.5%, 10%, 20%, 30%, 40%, 50%, 60%, 70%, 80%, 90%, 100%, 250%, 500%, 750%, or 1000%, or by a range defined by any of the two aforementioned percentages.

[0213] In some embodiments, the measurement is a cell count measurement. The cell count measurement may include an immune cell count measurement. Non-limiting examples of cell count measurements include: myeloid derived suppressor cell (MDSC) counts and subpopulations, CD8+ tumor infiltrating lymphocytes (TILs), Leukocyte counts, T and B lymphocyte counts and activation states, monocyte counts, macrophage counts and activation states, dendritic cell counts, neutrophil counts, eosinophil counts, basophil counts, or mast cell counts. The cell count measurement may include a MDSC count. The cell count measurement may include a MDSC subpopulation measurement. The cell count measurement may include a CD8+ TIL measurement. The cell count measurement may include a leukocyte count. The cell count measurement may include a T lymphocyte count. The cell count measurement may include a B lymphocyte count. The cell count measurement may include a T lymphocyte activation state measurement. The cell count measurement may include a B lymphocyte activation state measurement. The cell count measurement may include a monocyte count. The cell count measurement may include a macrophage count. The cell count measurement may include a macrophage activation state measurement. The cell count measurement may include a dendritic cell count. The cell count measurement may include a neutrophil count. The cell count measurement may include a eosinophil count. The cell count measurement may include a basophil count. The cell count measurement may include a mast cell count. In some embodiments, the cell count measurement is a cell count concentration (for example, mg/dL). In some embodiments, the cell count measurement is a circulating cell count measurement in the blood. In some embodiments, the cell count measurement is obtained by centrifuging a blood sample and measuring the sample in various concentrations.

[0214] In some embodiments, the composition improves the cell count measurement relative to the baseline cell count measurement. The improvement may comprise a change (e.g., an increase or decrease). In some embodiments, the improvement is an increase. In some embodiments, the improvement is a decrease. In some embodiments, the composition improves circulating cell count relative to the baseline cell count measurement. In some embodiments, the improved cell counts are measured in a second sample obtained from the subject after administering the composition to the subject. In some embodiments, the cell count measurement is improved by about 2.5% or more, about 5% or more, or about 7.5% or more, relative to the baseline cell count measurement. In some embodiments, the cell count measurement is improved by about 10% or more, relative to the baseline cell count measurement. In some embodiments, the cell count measurement is improved by about 20% or more, about 30% or more, about 40% or more, about 50% or more, about 60% or more, about 70% or more, about 80% or more, about 90% or more, or about 100% or more relative to the baseline cell count measurement. In some embodiments, the cell count measurement is improved by no more than about 2.5%, no more than about 5%, or no more than about 7.5%, relative to the baseline cell count measurement. In some embodiments, the cell count measurement is improved by no more than about 10%, relative to the baseline cell count measurement. In some embodiments, the cell count measurement is improved by no more than about 20%, no more than about 30%, no more than about 40%, no more than about 50%, no more than about 60%, no more than about 70%, no more than about 80%, no more than about 90%, or about 100% relative to the baseline cell count measurement. In some embodiments, the cell count measurement is improved by 2.5%, 5%, 7.5%, 10%, 20%, 30%, 40%, 50%, 60%, 70%, 80%, 90%, or 100%, or by a range defined by any of the two aforementioned percentages. In some embodiments where the improvement is an increase, the change is by more than 100%.

[0215] In some embodiments, the measurement is an antibody level measurement. Non-limiting examples of antibody level measurements include: IgA levels, IgG levels, or IgM levels. In some embodiments, the antibody level measurement is an antibody level concentration (for example, mg/dL). The antibody level may include an IgA level. The antibody level may include an IgG level. The antibody level may include an IgM level. In some embodiments, the antibody level measurement is a circulating antibody level measurement. In some embodiments, the antibody level measurement is obtained by an assay such as an immunoassay, a colorimetric assay, or a fluorescence assay.

[0216] In some embodiments, the composition improves the antibody level measurement relative to the baseline antibody level measurement. The improvement may comprise a change (e.g., an increase or decrease). In some embodiments, the improvement is an increase. In some embodiments, the improvement is a decrease. In some embodiments, the composition improves circulating antibody level relative to the baseline antibody level measurement. In some embodiments, the improved antibody levels are measured in a second sample obtained from the subject after administering the composition to the subject. In some embodiments, the antibody level measurement is improved by about 2.5% or more, about 5% or more, or about 7.5% or more, relative to the baseline antibody level measurement. In some embodiments, the antibody level measurement is improved by about 10% or more, relative to the baseline antibody level measurement. In some embodiments, the antibody level measurement is improved by about 20% or more, about 30% or more, about 40% or more, about 50% or more, about 60% or more, about 70% or more, about 80% or more, about 90% or more, or about 100% or more relative to the baseline antibody level measurement. In some embodiments, the antibody level measurement is improved by no more than about 2.5%, no more than about 5%, or no more than about 7.5%, relative to the baseline antibody level measurement. In some embodiments, the antibody level measurement is improved by no more than about 10%, relative to the baseline antibody level measurement. In some embodiments, the antibody level measurement is improved by no more than about 20%, no more than about 30%, no more than about 40%, no more than about 50%, no more than about 60%, no more than about 70%, no more than about 80%, no more than about 90%, or about 100% relative to the baseline antibody level measurement. In some embodiments, the antibody level measurement is improved by 2.5%, 5%, 7.5%, 10%, 20%, 30%, 40%, 50%, 60%, 70%, 80%, 90%, or 100%, or by a range defined by any of the two aforementioned percentages. In some embodiments where the improvement is an increase, the change is by more than 100%.

[0217] In some embodiments, the measurement is a tumor marker level measurement. Non-limiting examples of tumor marker level measurements include levels of tumor markers such as CEA, PSA, CA 125, CA 15-3, CA 19-9, CA 27.29, CA 72-4, AFP, hCG, B2M, BTA, calcitonin, CgA, CELLSEARCH, DCP, gastrin, HE4, LDH, NSE, NMP22, or PAP. The tumor marker may include CEA. The tumor marker may include PSA. The tumor marker may include CA 125. The tumor marker may include CA 15-3. The tumor marker may include CA 19-9. The tumor marker may include CA 27.29. The tumor marker may include CA 72-4. The tumor marker may include AFP. The tumor marker may include hCG. The tumor marker may include B2M. The tumor marker may include BTA. The tumor marker may include calcitonin. The tumor marker may include CgA. The tumor marker may include CELLSEARCH. The tumor marker may include DCP. The tumor marker may include gastrin. The tumor marker may include HE4. The tumor marker may include LDH. The tumor marker may include NSE. The tumor marker may include NMP22. The tumor marker may include PAP. In some embodiments, the tumor marker level measurement is a tumor marker level concentration (for example, mg/dL). In some embodiments, the tumor marker level concentration is a total tumor marker level concentration. In some embodiments, the tumor marker level measurement is a circulating tumor marker level measurement. In some embodiments, the tumor marker level measurement is obtained by a blood test, urine test, or biopsy.

[0218] In some embodiments, the composition improves the tumor marker level measurement relative to the baseline tumor marker level measurement. The improvement may comprise a change (e.g., an increase or decrease). In some embodiments, the improvement is an increase. In some embodiments, the improvement is a decrease. In some embodiments, the composition improves circulating tumor marker level relative to the baseline tumor marker level measurement. In some embodiments, the improved tumor marker levels are measured in a second sample obtained from the subject after administering the composition to the subject. In some embodiments, the tumor marker level measurement is improved by about 2.5% or more, about 5% or more, or about 7.5% or more, relative to the baseline tumor marker level measurement. In some embodiments, the tumor marker level measurement is improved by about 10% or more, relative to the baseline tumor marker level measurement. In some embodiments, the tumor marker level measurement is improved by about 20% or more, about 30% or more, about 40% or more, about 50% or more, about 60% or more, about 70% or more, about 80% or more, about 90% or more, or about 100% or more relative to the baseline tumor marker level measurement. In some embodiments, the tumor marker level measurement is improved by no more than about 2.5%, no more than about 5%, or no more than about 7.5%, relative to the baseline tumor marker level measurement. In some embodiments, the tumor marker level measurement is improved by no more than about 10%, relative to the baseline tumor marker level measurement. In some embodiments, the tumor marker level measurement is improved by no more than about 20%, no more than about 30%, no more than about 40%, no more than about 50%, no more than about 60%, no more than about 70%, no more than about 80%, no more than about 90%, or about 100% relative to the baseline tumor marker level measurement. In some embodiments, the tumor marker level measurement is improved by 2.5%, 5%, 7.5%, 10%, 20%, 30%, 40%, 50%, 60%, 70%, 80%, 90%, or 100%, or by a range defined by any of the two aforementioned percentages. In some embodiments where the improvement is an increase, the change is by more than 100%.

[0219] In some embodiments, the measurement is an HGFAC protein measurement. In some embodiments, the HGFAC protein measurement comprises an HGFAC protein level. In some embodiments, the HGFAC protein level is indicated as a mass or percentage of HGFAC protein per sample weight. In some embodiments, the HGFAC protein level is indicated as a mass or percentage of HGFAC protein per sample volume. In some embodiments, the HGFAC protein level is indicated as a mass or percentage of HGFAC protein per total protein within the sample. In some embodiments, the HGFAC protein measurement is a circulating/tissue HGFAC protein measurement. In some embodiments, the HGFAC protein measurement is obtained by an assay such as an immunoassay, a colorimetric assay, or a fluorescence assay.

[0220] In some embodiments, the composition reduces the HGFAC protein measurement relative to the baseline HGFAC protein measurement. In some embodiments, the composition reduces circulating HGFAC protein levels relative to the baseline HGFAC protein measurement. In some embodiments, the composition reduces tissue HGFAC protein levels relative to the baseline HGFAC protein measurement.

[0221] In some embodiments, the reduced HGFAC protein levels are measured in a second sample obtained from the subject after administering the composition to the subject. In some embodiments, the HGFAC protein measurement is decreased by about 2.5% or more, about 5% or more, or about 7.5% or more, relative to the baseline HGFAC protein measurement. In some embodiments, the HGFAC protein measurement is decreased by about 10% or more, relative to the baseline HGFAC protein measurement. In some embodiments, the HGFAC protein measurement is decreased by about 20% or more, about 30% or more, about 40% or more, about 50% or more, about 60% or more, about 70% or more, about 80% or more, about 90% or more, or about 100%, relative to the baseline HGFAC protein measurement. In some embodiments, the HGFAC protein measurement is decreased by no more than about 2.5%, no more than about 5%, or no more than about 7.5%, relative to the baseline HGFAC protein measurement. In some embodiments, the HGFAC protein measurement is decreased by no more than about 10%, relative to the baseline HGFAC protein measurement. In some embodiments, the HGFAC protein measurement is decreased by no more than about 20%, no more than about 30%, no more than about 40%, no more than about 50%, no more than about 60%, no more than about 70%, no more than about 80%, no more than about 90%, or no more than about 100% relative to the baseline HGFAC protein measurement. In some embodiments, the HGFAC protein measurement is decreased by 2.5%, 5%, 7.5%, 19%, 20%, 30%, 40%, 50%, 60%, 70%, 80%, 90%, or 100%, or by a range defined by any of the two aforementioned percentages.

[0222] In some embodiments, the measurement is an HGFAC mRNA measurement. In some embodiments, the HGFAC mRNA measurement comprises an HGFAC mRNA level. In some embodiments, the HGFAC mRNA level is indicated as an amount or percentage of HGFAC mRNA per sample weight. In some embodiments, the HGFAC mRNA level is indicated as an amount or percentage of HGFAC mRNA per sample volume. In some embodiments, the HGFAC mRNA level is indicated as an amount or percentage of HGFAC mRNA per total mRNA within the sample. In some embodiments, the HGFAC mRNA level is indicated as an amount or percentage of HGFAC mRNA per total nucleic acids within the sample. In some embodiments, the HGFAC mRNA level is indicated relative to another mRNA level, such as an mRNA level of a housekeeping gene, within the sample. In some embodiments, the HGFAC mRNA measurement is a circulating/tissue HGFAC mRNA measurement. In some embodiments, the HGFAC mRNA measurement is obtained by an assay such as a PCR assay. In some embodiments, the PCR comprises qPCR. In some embodiments, the PCR comprises reverse transcription of the HGFAC mRNA.

[0223] In some embodiments, the composition reduces the HGFAC mRNA measurement relative to the baseline HGFAC mRNA measurement. In some embodiments, the HGFAC mRNA measurement is obtained in a second sample obtained from the subject after administering the composition to the subject.

[0224] In some embodiments, the composition reduces HGFAC mRNA levels relative to the baseline HGFAC mRNA levels. In some embodiments, the reduced HGFAC mRNA levels are measured in a second sample obtained from the subject after administering the composition to the subject. In some embodiments, the second sample is a liver sample. In some embodiments, the second sample is an adipose sample. In some embodiments, the HGFAC mRNA measurement is reduced by about 2.5% or more, about 5% or more, or about 7.5% or more, relative to the baseline HGFAC mRNA measurement. In some embodiments, the HGFAC mRNA measurement is decreased by about 10% or more, relative to the baseline HGFAC mRNA measurement. In some embodiments, the HGFAC mRNA measurement is decreased by about 20% or more, about 30% or more, about 40% or more, about 50% or more, about 60% or more, about 70% or more, about 80% or more, about 90% or more, or about 100%, relative to the baseline HGFAC mRNA measurement. In some embodiments, the HGFAC mRNA measurement is decreased by no more than about 2.5%, no more than about 5%, or no more than about 7.5%, relative to the baseline HGFAC mRNA measurement. In some embodiments, the HGFAC mRNA measurement is decreased by no more than about 10%, relative to the baseline HGFAC mRNA measurement. In some embodiments, the HGFAC mRNA measurement is decreased by no more than about 20%, no more than about 30%, no more than about 40%, no more than about 50%, no more than about 60%, no more than about 70%, no more than about 80%, no more than about 90%, or no more than about 100%, relative to the baseline HGFAC mRNA measurement. In some embodiments, the HGFAC mRNA measurement is decreased by 2.5%, 5%, 7.5%, 10%, 20%, 30%, 40%, 50%, 60%, 70%, 80%, 90%, or 100% or by a range defined by any of the two aforementioned percentages.

### III. Definitions

[0225] Unless defined otherwise, all terms of art, notations and other technical and scientific terms or terminology used herein are intended to have the same meaning as is commonly understood by one of ordinary skill in the art to which the claimed subject matter pertains. In some cases, terms with commonly understood meanings are defined herein for clarity and/or for ready reference, and the inclusion of such definitions herein should not necessarily be construed to represent a substantial difference over what is generally understood in the art.

[0226] Throughout this application, various embodiments may be presented in a range format. It should be understood that the description in range format is merely for convenience and brevity and should not be construed as an inflexible limitation on the scope of the disclosure. Accordingly, the description of a range should be considered to have specifically disclosed all the possible subranges as well as individual numerical values within that range. For example, description of a range such as from 1 to 6 should be considered to have specifically disclosed subranges such as from 1 to 3, from 1 to 4, from 1 to 5, from 2 to 4, from 2 to 6, from 3 to 6 etc., as well as individual numbers within that range, for example, 1, 2, 3, 4, 5, and 6. This applies regardless of the breadth of the range.

[0227] As used in the specification and claims, the singular forms “a”, “an” and “the” include plural references unless the context clearly dictates otherwise. For example, the term “a sample” includes a plurality of samples, including mixtures thereof.

[0228] The terms “determining,” “measuring,” “evaluating,” “assessing,” “assaying,” and “analyzing” are often used interchangeably herein to refer to forms of measurement. The terms include determining if an element is present or not (for example, detection). These terms can include quantitative, qualitative or quantitative and qualitative determinations. Assessing can be relative or absolute. “Detecting the presence of” can include determining the amount of something present in addition to determining whether it is present or absent depending on the context.

[0229] The terms “subject,” and “patient” may be used interchangeably herein. A “subject” can be a biological entity containing expressed genetic materials. The biological entity can be a plant, animal, or microorganism, including, for example, bacteria, viruses, fungi, and protozoa. The subject can be a mammal. The mammal can be a human. The subject may be diagnosed or suspected of being at high risk for a disease. In some cases, the subject is not necessarily diagnosed or suspected of being at high risk for the disease.

[0230] As used herein, the term “about” a number refers to that number plus or minus 10% of that number. The term “about” a range refers to that range minus 10% of its lowest value and plus 10% of its greatest value.

[0231] As used herein, the terms “treatment” or “treating” are used in reference to a pharmaceutical or other intervention regimen for obtaining beneficial or desired results in the recipient. Beneficial or desired results include but are not limited to a therapeutic benefit and/or a prophylactic benefit. A therapeutic benefit may refer to eradication or amelioration of symptoms or of an underlying disorder being treated. Also, a therapeutic benefit can be achieved with the eradication or amelioration of one or more of the physiological symptoms associated with the underlying disorder such that an improvement is observed in the subject, notwithstanding that the subject may still be afflicted with the underlying disorder. A prophylactic effect includes delaying, preventing, or eliminating the appearance of a disease or condition, delaying or eliminating the onset of symptoms of a disease or condition, slowing, halting, or reversing the progression of a disease or condition, or any combination thereof. For prophylactic benefit, a subject at risk of developing a particular disease, or to a subject reporting one or more of the physiological symptoms of a disease may undergo treatment, even though a diagnosis of this disease may not have been made.

[0232] Some embodiments refer to nucleic acid sequence information. It is contemplated that in some embodiments, thymine (T) may be interchanged with uracil (U), or vice versa. For example, some sequences in the sequence listing may recite Ts, but these may be replaced with Us in some embodiments. In some oligonucleotides with nucleic acid sequences that include uracil, the uracil may be replaced with thymine. Similarly, in some oligonucleotides with nucleic acid sequences that include thymine, the thymine may be replaced with uracil. In some embodiments, an oligonucleotide such as an siRNA comprises or consists of RNA. In some embodiments, the oligonucleotide may include DNA. For example, the oligonucleotide may include 2′ deoxyribonucleotides. An ASO may comprise or consist of DNA.

[0233] The term “Cx-y” or “Cx-Cy” when used in conjunction with a chemical moiety, such as alkyl, alkenyl, or alkynyl is meant to include groups that contain from x to y carbons in the chain. For example, the term “C1-6alkyl” refers to substituted or unsubstituted saturated hydrocarbon groups, including straight-chain alkyl and branched-chain alkyl groups that contain from 1 to 6 carbons.

[0234] The terms “Cx-yalkenyl” and “Cx-yalkynyl” refer to substituted or unsubstituted unsaturated aliphatic groups analogous in length and possible substitution to the alkyls described above, but that contain at least one double or triple bond, respectively.

[0235] The term “carbocycle” as used herein refers to a saturated, unsaturated or aromatic ring in which each atom of the ring is carbon. Carbocycle includes 3- to 10-membered monocyclic rings, 5- to 12-membered bicyclic rings, 5- to 12-membered spiro bicycles, and 5- to 12-membered bridged rings. Each ring of a bicyclic carbocycle may be selected from saturated, unsaturated, and aromatic rings. In an exemplary embodiment, an aromatic ring, e.g., phenyl, may be fused to a saturated or unsaturated ring, e.g., cyclohexane, cyclopentane, or cyclohexene. A bicyclic carbocycle includes any combination of saturated, unsaturated and aromatic bicyclic rings, as valence permits. A bicyclic carbocycle further includes spiro bicyclic rings such as spiropentane. A bicyclic carbocycle includes any combination of ring sizes such as 3-3 spiro ring systems, 4-4 spiro ring systems, 4-5 fused ring systems, 5-5 fused ring systems, 5-6 fused ring systems, 6-6 fused ring systems, 5-7 fused ring systems, 6-7 fused ring systems, 5-8 fused ring systems, and 6-8 fused ring systems. Exemplary carbocycles include cyclopentyl, cyclohexyl, cyclohexenyl, adamantyl, phenyl, indanyl, naphthyl, and bicyclo[1.1.1]pentanyl.

[0236] The term “aryl” refers to an aromatic monocyclic or aromatic multicyclic hydrocarbon ring system. The aromatic monocyclic or aromatic multicyclic hydrocarbon ring system contains only hydrogen and carbon and from five to eighteen carbon atoms, where at least one of the rings in the ring system is aromatic, i.e., it contains a cyclic, delocalized (4n+2) π-electron system in accordance with the Hückel theory. The ring system from which aryl groups are derived include, but are not limited to, groups such as benzene, fluorene, indane, indene, tetralin and naphthalene.

[0237] The term “cycloalkyl” refers to a saturated ring in which each atom of the ring is carbon. Cycloalkyl may include monocyclic and polycyclic rings such as 3- to 10-membered monocyclic rings, 5- to 12-membered bicyclic rings, 5- to 12-membered spiro bicycles, and 5- to 12-membered bridged rings.

[0238] In certain embodiments, a cycloalkyl comprises three to ten carbon atoms. In other embodiments, a cycloalkyl comprises five to seven carbon atoms. The cycloalkyl may be attached to the rest of the molecule by a single bond. Examples of monocyclic cycloalkyls include, e.g., cyclopropyl, cyclobutyl, cyclopentyl, cyclohexyl, cycloheptyl, and cyclooctyl. Polycyclic cycloalkyl radicals include, for example, adamantyl, spiropentane, norbornyl (i.e., bicyclo[2.2.1]heptanyl), decalinyl, 7,7 dimethyl bicyclo[2.2.1]heptanyl, bicyclo[1.1.1]pentanyl, and the like.

[0239] The term “cycloalkenyl” refers to a saturated ring in which each atom of the ring is carbon and there is at least one double bond between two ring carbons. Cycloalkenyl may include monocyclic and polycyclic rings such as 3- to 10-membered monocyclic rings, 6- to 12-membered bicyclic rings, and 5- to 12-membered bridged rings. In other embodiments, a cycloalkenyl comprises five to seven carbon atoms.

[0240] The cycloalkenyl may be attached to the rest of the molecule by a single bond. Examples of monocyclic cycloalkenyls include, e.g., cyclopentenyl, cyclohexenyl, cycloheptenyl, and cyclooctenyl.

[0241] The term “halo” or, alternatively, “halogen” or “halide,” means fluoro, chloro, bromo or iodo. In some embodiments, halo is fluoro, chloro, or bromo.

[0242] The term “haloalkyl” refers to an alkyl radical, as defined above, that is substituted by one or more halo radicals, for example, trifluoromethyl, dichloromethyl, bromomethyl, 2,2,2 trifluoroethyl, 1 chloromethyl 2 fluoroethyl, and the like. In some embodiments, the alkyl part of the haloalkyl radical is optionally further substituted as described herein.

[0243] The term “heterocycle” as used herein refers to a saturated, unsaturated or aromatic ring comprising one or more heteroatoms. Exemplary heteroatoms include N, O, Si, P, B, and S atoms.

[0244] Heterocycles include 3- to 10-membered monocyclic rings, 6- to 12-membered bicyclic rings, 5- to 12-membered spiro bicycles, and 5- to 12-membered bridged rings. A bicyclic heterocycle includes any combination of saturated, unsaturated and aromatic bicyclic rings, as valence permits. In an exemplary embodiment, an aromatic ring, e.g., pyridyl, may be fused to a saturated or unsaturated ring, e.g., cyclohexane, cyclopentane, morpholine, piperidine or cyclohexene. A bicyclic heterocycle includes any combination of ring sizes such as 4-5 fused ring systems, 5-5 fused ring systems, 5-6 fused ring systems, 6-6 fused ring systems, 5-7 fused ring systems, 6-7 fused ring systems, 5-8 fused ring systems, and 6-8 fused ring systems. A bicyclic heterocycle further includes spiro bicyclic rings, e.g., 5 to 12-membered spiro bicycles, such as 2-oxa-6-azaspiro[3.3]heptane.

[0245] The term “heteroaryl” refers to a radical derived from a 5 to 18 membered aromatic ring radical that comprises two to seventeen carbon atoms and from one to six heteroatoms selected from nitrogen, oxygen and sulfur. As used herein, the heteroaryl radical is a monocyclic, bicyclic, tricyclic or tetracyclic ring system, wherein at least one of the rings in the ring system is aromatic, i.e., it contains a cyclic, delocalized (4n+2) π-electron system in accordance with the Hückel theory. Heteroaryl includes fused or bridged ring systems. The heteroatom(s) in the heteroaryl radical is optionally oxidized. One or more nitrogen atoms, if present, are optionally quaternized. The heteroaryl is attached to the rest of the molecule through any atom of the ring(s). Examples of heteroaryls include, but are not limited to, azepinyl, acridinyl, benzimidazolyl, benzindolyl, 1,3 benzodioxolyl, benzofuranyl, benzoxazolyl, benzo[d]thiazolyl, benzothiadiazolyl, benzo[b][1,4]dioxepinyl, benzo[b][1,4]oxazinyl, 1,4 benzodioxanyl, benzonaphthofuranyl, benzoxazolyl, benzodioxolyl, benzodioxinyl, benzopyranyl, benzopyranonyl, benzofuranyl, benzofuranonyl, benzothienyl (benzothiophenyl), benzothieno[3,2 d]pyrimidinyl, benzotriazolyl, benzo[4,6]imidazo[1,2 a]pyridinyl, carbazolyl, cinnolinyl, cyclopenta[d]pyrimidinyl, 6,7 dihydro 5H cyclopenta[4,5]thieno[2,3 d]pyrimidinyl, 5,6 dihydrobenzo[h]quinazolinyl, 5,6 dihydrobenzo[h]cinnolinyl, 6,7-dihydro-5H-benzo[6,7]cyclohepta[1,2-c]pyridazinyl, dibenzofuranyl, dibenzothiophenyl, furanyl, furanonyl, furo[3,2 c]pyridinyl, 5,6,7,8,9,10 hexahydrocycloocta[d]pyrimidinyl, 5,6,7,8,9,10 hexahydrocycloocta[d]pyridazinyl, 5,6,7,8,9,10 hexahydrocycloocta[d]pyridinyl, isothiazolyl, imidazolyl, indazolyl, indolyl, indazolyl, isoindolyl, indolinyl, isoindolinyl, isoquinolyl, indolizinyl, isoxazolyl, 5,8 methano 5,6,7,8 tetrahydroquinazolinyl, naphthyridinyl, 1,6 naphthyridinonyl, oxadiazolyl, 2 oxoazepinyl, oxazolyl, oxiranyl, 5,6,6a,7,8,9,10,10a octahydrobenzo[h]quinazolinyl, 1 phenyl 1H pyrrolyl, phenazinyl, phenothiazinyl, phenoxazinyl, phthalazinyl, pteridinyl, purinyl, pyrrolyl, pyrazolyl, pyrazolo[3,4 d]pyrimidinyl, pyridinyl, pyrido[3,2 d]pyrimidinyl, pyrido[3,4 d]pyrimidinyl, pyrazinyl, pyrimidinyl, pyridazinyl, pyrrolyl, quinazolinyl, quinoxalinyl, quinolinyl, isoquinolinyl, tetrahydroquinolinyl, 5,6,7,8 tetrahydroquinazolinyl, 5,6,7,8 tetrahydrobenzo[4,5]thieno[2,3 d]pyrimidinyl, 6,7,8,9 tetrahydro 5H cyclohepta[4,5]thieno[2,3 d]pyrimidinyl, 5,6,7,8 tetrahydropyrido[4,5 c]pyridazinyl, thiazolyl, thiadiazolyl, triazolyl, tetrazolyl, triazinyl, thieno[2,3 d]pyrimidinyl, thieno[3,2 d]pyrimidinyl, thieno[2,3 c]pyridinyl, and thiophenyl (i.e. thienyl).

[0246] The term “heterocycloalkyl” refers to a saturated ring with carbon atoms and at least one heteroatom. Exemplary heteroatoms include N, O, Si, P, B, and S atoms. Heterocycloalkyl may include monocyclic and polycyclic rings such as 3- to 10-membered monocyclic rings, 6- to 12-membered bicyclic rings, 5- to 12-membered spiro bicycles, and 5- to 12-membered bridged rings. The heteroatoms in the heterocycloalkyl radical are optionally oxidized. One or more nitrogen atoms, if present, are optionally quaternized. The heterocycloalkyl is attached to the rest of the molecule through any atom of the heterocycloalkyl, valence permitting, such as any carbon or nitrogen atoms of the heterocycloalkyl. Examples of heterocycloalkyl radicals include, but are not limited to, dioxolanyl, thienyl[1,3]dithianyl, decahydroisoquinolyl, imidazolinyl, imidazolidinyl, isothiazolidinyl, isoxazolidinyl, morpholinyl, octahydroindolyl, octahydroisoindolyl, 2 oxopiperazinyl, 2 oxopiperidinyl, 2 oxopyrrolidinyl, oxazolidinyl, piperidinyl, piperazinyl, 4 piperidonyl, pyrrolidinyl, pyrazolidinyl, quinuclidinyl, thiazolidinyl, tetrahydrofuryl, trithianyl, tetrahydropyranyl, thiomorpholinyl, thiamorpholinyl, 1 oxo thiomorpholinyl, 2-oxa-6-azaspiro[3.3]heptane, and 1,1 dioxo thiomorpholinyl.

[0247] The term “heterocycloalkenyl” refers to an unsaturated ring with carbon atoms and at least one heteroatom and there is at least one double bond between two ring carbons. Heterocycloalkenyl does not include heteroaryl rings. Exemplary heteroatoms include N, O, Si, P, B, and S atoms. Heterocycloalkenyl may include monocyclic and polycyclic rings such as 3- to 10-membered monocyclic rings, 6- to 12-membered bicyclic rings, and 5- to 12-membered bridged rings. In other embodiments, a heterocycloalkenyl comprises five to seven ring atoms. The heterocycloalkenyl may be attached to the rest of the molecule by a single bond. Examples of monocyclic cycloalkenyls include, e.g., pyrroline (dihydropyrrole), pyrazoline (dihydropyrazole), imidazoline (dihydroimidazole), triazoline (dihydrotriazole), dihydrofuran, dihydrothiophene, oxazoline (dihydrooxazole), isoxazoline (dihydroisoxazole), thiazoline (dihydrothiazole), isothiazoline (dihydroisothiazole), oxadiazoline (dihydrooxadiazole), thiadiazoline (dihydrothiadiazole), dihydropyridine, tetrahydropyridine, dihydropyridazine, tetrahydropyridazine, dihydropyrimidine, tetrahydropyrimidine, dihydropyrazine, tetrahydropyrazine, pyran, dihydropyran, thiopyran, dihydrothiopyran, dioxine, dihydrodioxine, oxazine, dihydrooxazine, thiazine, and dihydrothiazine.

[0248] The term “substituted” refers to moieties having substituents replacing a hydrogen on one or more carbons or substitutable heteroatoms, e.g., an NH or NH2 of a compound. It will be understood that “substitution” or “substituted with” includes the implicit proviso that such substitution is in accordance with permitted valence of the substituted atom and the substituent, and that the substitution results in a stable compound, i.e., a compound which does not spontaneously undergo transformation such as by rearrangement, cyclization, elimination, etc. In certain embodiments, substituted refers to moieties having substituents replacing two hydrogen atoms on the same carbon atom, such as substituting the two hydrogen atoms on a single carbon with an oxo, imino or thioxo group. As used herein, the term “substituted” is contemplated to include all permissible substituents of organic compounds. In a broad aspect, the permissible substituents include acyclic and cyclic, branched and unbranched, carbocyclic and heterocyclic, aromatic and non-aromatic substituents of organic compounds. The permissible substituents can be one or more and the same or different for appropriate organic compounds.

[0249] In some embodiments, substituents may include any substituents described herein, for example: halogen, hydroxy, oxo (═O), thioxo (═S), cyano (—CN), nitro (—NO₂), imino (═N—H), oximo (═N—OH), hydrazino (═N—NH2), —Rb ORa, —Rb OC(O) Ra, —Rb OC(O) ORa, —Rb OC(O) N(Ra)₂, —Rb N(Ra)₂, —Rb C(O)Ra, —Rb C(O)ORa, —Rb C(O)N(Ra)₂, —Rb O Re C(O)N(Ra)₂, —Rb N(Ra)C(O)ORa, —Rb N(Ra)C(O)Ra, —Rb N(Ra)S(O)tRa (where t is 1 or 2), —Rb S(O)tRa (where t is 1 or 2), —Rb S(O)tORa (where t is 1 or 2), and —Rb S(O)tN(Ra)₂ (where t is 1 or 2); and alkyl, alkenyl, alkynyl, aryl, aralkyl, aralkenyl, aralkynyl, cycloalkyl, cycloalkylalkyl, heterocycloalkyl, heterocycloalkylalkyl, heteroaryl, and heteroarylalkyl, any of which may be optionally substituted by alkyl, alkenyl, alkynyl, halogen, haloalkyl, haloalkenyl, haloalkynyl, oxo (═O), thioxo (═S), cyano (—CN), nitro (—NO₂), imino (═N—H), oximo (═N—OH), hydrazine (═N—NH2), —Rb ORa, —Rb OC(O) Ra, —Rb OC(O) ORa, —Rb OC(O) N(Ra)₂, —Rb N(Ra)₂, —Rb C(O)Ra, —Rb C(O)ORa, —Rb C(O)N(Ra)₂, —Rb O Re C(O)N(Ra)₂, —Rb N(Ra)C(O)ORa, —Rb N(Ra)C(O)Ra, —Rb N(Ra)S(O)tRa (where t is 1 or 2), —Rb S(O)tRa (where t is 1 or 2), —Rb S(O)tORa (where t is 1 or 2) and —Rb S(O)tN(Ra)₂ (where t is 1 or 2); wherein each Ra is independently selected from hydrogen, alkyl, cycloalkyl, cycloalkylalkyl, aryl, aralkyl, heterocycloalkyl, heterocycloalkylalkyl, heteroaryl, or heteroarylalkyl, wherein each Ra, valence permitting, may be optionally substituted with alkyl, alkenyl, alkynyl, halogen, haloalkyl, haloalkenyl, haloalkynyl, oxo (═O), thioxo (═S), cyano (—CN), nitro (—NO₂), imino (═N—H), oximo (═N—OH), hydrazine (═N—NH2), —Rb ORa, —Rb OC(O) Ra, —Rb OC(O) ORa, —Rb OC(O) N(Ra)₂, —Rb N(Ra)₂, —Rb C(O)Ra, —Rb C(O)ORa, —Rb C(O)N(Ra)₂, —Rb O Re C(O)N(Ra)₂, —Rb N(Ra)C(O)ORa, —Rb N(Ra)C(O)Ra, —Rb N(Ra)S(O)tRa (where t is 1 or 2), —Rb S(O)tRa (where t is 1 or 2), —Rb S(O)tORa (where t is 1 or 2) and —Rb S(O)tN(Ra)₂ (where t is 1 or 2); and wherein each Rb is independently selected from a direct bond or a straight or branched alkylene, alkenylene, or alkynylene chain, and each Re is a straight or branched alkylene, alkenylene or alkynylene chain.

[0250] Double bonds to oxygen atoms, such as oxo groups, are represented herein as both “═O” and “(O)”. Double bonds to nitrogen atoms are represented as both “═NR” and “(NR)”. Double bonds to sulfur atoms are represented as both “═S” and “(S)”.

[0251] In some embodiments, a “derivative” polypeptide or peptide is one that is modified, for example, by glycosylation, pegylation, phosphorylation, sulfation, reduction/alkylation, acylation, chemical coupling, or mild formalin treatment. A derivative may also be modified to contain a detectable label, either directly or indirectly, including, but not limited to, a radioisotope, fluorescent, and enzyme label.

[0252] Some embodiments refer to nucleic acid sequence information. It is contemplated that in some embodiments, thymine (T) may be interchanged with uracil (U), or vice versa. For example, some sequences in the sequence listing may recite Ts, but these may be replaced with Us in some embodiments.

[0253] In some oligonucleotides with nucleic acid sequences that include uracil, the uracil may be replaced with thymine. Similarly, in some oligonucleotides with nucleic acid sequences that include thymine, the thymine may be replaced with uracil. In some embodiments, an oligonucleotide such as an siRNA comprises or consists of RNA. In some embodiments, the oligonucleotide may include DNA. For example, the oligonucleotide may include 2′ deoxyribonucleotides. An ASO may comprise or consist of DNA. To any extent that the sequence listing contradicts the disclosure in the specification, the specification takes precedent.

[0254] Some aspects include sequences with nucleotide modifications or modified internucleoside linkages. Generally, and unless otherwise specified, Nf (e.g. Af, Cf, Gf, Tf, or Uf) refers to a 2′ fluoro-modified nucleoside, dN (e.g. dA, dC, dG, dT, or dU) refers to a 2′ deoxy nucleoside, n (e.g. a, c, g, t, or u) refers to a 2′ O-methyl modified nucleoside, and “s” refers to a phosphorothioate linkage.

[0255] A pyrimidine may include cytosine (C), thymine (T), or uracil (U). A pyrimidine may include C or U. A pyrimidine may include C or T. Where a pyrimidine is referred to, it may indicate a nucleoside or nucleotide comprising a pyrimidine. A purine may include guanine (G) or adenine (A). Where a purine is referred to, it may indicate a nucleoside or nucleotide comprising a purine.

[0256] The section headings used herein are for organizational purposes only and are not to be construed as limiting the subject matter described.

### VI. EXAMPLES

### Example 1: Rare, Predicted-Deleterious Variants in the HGFAC Gene Demonstrate Inverse Associations for Malignancies Vs. Autoimmune Diseases

[0257] HGFAC variants were evaluated for associations with a variety of cancer and immunological traits in approximately 452,000 individuals with genotype data from the UK Biobank cohort. Variants were evaluated in a gene burden test comprised of a total of 22 rare, predicted-deleterious coding variants: 15 variants annotated as deleterious missense, 4 annotated frameshift variants, 2 annotated splice donor variants and 1 annotated stop gain variant. Table 2 lists these variants. It was hypothesized that individually these variants would result in a decrease in the abundance and activity of the HGFAC gene product, and that it is this loss of function that would lead to the observed genetic associations.

TABLE 2
HGFAC gene variants included in the gene burden test

| Variant | rsID | Consequence |
|---|---|---|
| chr4:3444054:G:C | rs564042558 | deleterious_missense_variant |
| chr4:3444143:G:C | rs917199559 | deleterious_missense_variant |
| chr4:3444395:G:A | rs748413339 | deleterious_missense_variant |
| chr4:3444423:C:G | rs201082880 | deleterious_missense_variant |
| chr4:3444433:C:T | rs780551152 | stop_gained |
| chr4:3444975:G:A | rs545303850 | deleterious_missense_variant |
| chr4:3444992:C:G | rs373478970 | deleterious_missense_variant |
| chr4:3444992:C:T | rs373478970 | deleterious_missense_variant |
| chr4:3444993:G:A | rs1365995245 | deleterious_missense_variant |
| chr4:3446120:G:T | rs1010904877 | deleterious_missense_variant |
| chr4:3446239:G:A | rs369079003 | deleterious_missense_variant |
| chr4:3447576:G:GA | rs765340154 | frameshift_variant |
| chr4:3447625:G:A | rs996743028 | deleterious_missense_variant |
| chr4:3447631:G:GGTGA | rs758675316 | frameshift_variant |
| chr4:3447633:T:C | rs139240360 | splice_donor_variant |
| chr4:3447965:GC:G | rs907650708 | frameshift_variant |
| chr4:3448167:TC:T | rs760119184 | frameshift_variant |
| chr4:3448236:T:G | rs138538142 | deleterious_missense_variant |
| chr4:3448277:G:A | rs757531620 | splice_donor_variant |
| chr4:3449291:G:A | rs769181942 | deleterious_missense_variant |
| chr4:3449318:G:A | rs375925462 | deleterious_missense_variant |
| chr4:3449351:G:A | rs559231140 | deleterious_missense_variant |

[0258] The analyses resulted in identification of associations with the HGFAC burden test and several cancer and autoimmune disease traits (Table 3). For example, there were protective associations with cancer in a pan-cancer case-control study. The HGFAC burden test was associated with protection from individual cancers, including malignant neoplasms of the digestive organs. Additionally, the HGFAC burden test was associated with increased risk of autoimmune diseases, including specified forms of hypothyroidism and systemic sclerosis (scleroderma).

TABLE 3
Associations with cancer and autoimmune disease traits

| | | | Malignant | | Malignant neoplasms | | Specified | | Systemic sclerosis | |
|---|---|---|---|---|---|---|---|---|---|---|
| | | | Neoplasm | | of digestive organs | | Hypothyroidism | | [scleroderma] | |
| | | | (n = 89350) | | (n = 15497) | | (n = 2599) | | (n = 802) | |
| | | | P | | P | | P | | P | |
| Test | Gene | AAF | value | OR | value | OR | value | OR | value | OR |
| Burden | HGFAC | 0.0009 | 5.77E−05 | ↓0.683 | 0.003 | ↓0.480 | 2.24E−05 | ↑3.402 | 2.35E−04 | ↑5.114 |

[0259] The results indicated that reduced abundance/activity of HGFAC resulted in protection from malignant neoplasms and increased risk of autoimmune disease; and suggested that therapeutic inhibition of HGFAC may represent a novel approach to immunotherapy that may be used in the treatment of a variety of cancers.

### Example 2: Bioinformatic Selection of Sequences in Order to Identify Therapeutic siRNAs to Down Modulate Expression of the HGFAC mRNA

[0260] Screening sets were defined based on bioinformatic analysis. Therapeutic siRNAs were designed to target human HGFAC. Predicted specificity in human, rhesus monkey, cynomolgus monkey, mouse, rat, rabbit, dog, gerbil, syrian hamster, chinese hamster, guinea pig and naked mole rat was determined for sense (S) and antisense (AS) strands. These were assigned a “specificity score” which considers the likelihood of unintended downregulation of any other transcript by full or partial complementarity of an siRNA strand (up to 2 mismatches within positions 2-18) as well as the number and positions of mismatches. Thus, off-target(s) transcripts for antisense and sense strands of each siRNA were identified. As identified, siRNAs with high specificity and a low number of predicted off-targets provided a benefit of increased targeting specificity.

[0261] In addition to selecting siRNA sequences with high sequence specificity to HGFAC mRNA, siRNA sequences within the seed region were analyzed for similarity to seed regions of known miRNAs. siRNAs can function in a miRNA like manner via base-pairing with complementary sequences within the 3′-UTR of mRNA molecules. The complementarity typically encompasses the 5′-bases at positions 2-7 of the miRNA (seed region). To circumvent siRNAs to act via functional miRNA binding sites, siRNA strands containing natural miRNA seed regions can be avoided. Seed regions identified in miRNAs from human, mouse, rat, rhesus monkey, dog, rabbit, and pig are referred to as “conserved”. Combining the “specificity score” with miRNA seed analysis yielded a “specificity category”. This is divided into categories 1-4, with 1 having the highest specificity and 4 having the lowest specificity. Each strand of the siRNA is assigned to a specificity category.

[0262] Analysis of the Genome Aggregation Database (gnomAD) to identify siRNAs targeting regions with known SNPs was also carried out to identify siRNAs that may be non-functional in individuals containing the SNP. Information regarding the positions of SNPs within the target sequence as well as minor allele frequency (MAF) in case data was obtained in this analysis.

[0263] Initial analysis of the relevant HGFAC mRNA sequence revealed few sequences that fulfil the specificity parameters and at the same time target HGFAC mRNA in all the analyzed relevant species. Therefore, independent screening subsets were designed for the therapeutic siRNAs.

[0264] The siRNAs in these subsets recognized at least the human HGFAC sequences. Therefore, the siRNAs in these subsets can be used to target human HGFAC in a therapeutic setting.

[0265] The number of siRNA sequences derived from human HGFAC mRNA (ENST00000382774, SEQ ID NO: 4193) without consideration of specificity or species cross-reactivity was 2051 (sense and antisense strand sequences included in SEQ ID NOS: 1-2051 and 2052-4102, respectively)

[0266] Prioritizing sequences for target specificity, miRNA seed region sequences and SNPs as described above yields subset A. Subset A contains 380 siRNAs whose base sequences are shown in Table A.

TABLE A
Subset A

| | SEQ ID | sense strand | SEQ ID | antisense strand |
|---|---|---|---|---|
| siRNA NO: | NO: | sequence (5′-3′) | NO: | sequence (5′-3′) |
| siRNA 26 | 26 | UCAGGAGCCAUGGGGCGCU | 2077 | AGCGCCCCAUGGCUCCUGA |
| siRNA 114 | 114 | UGCUGCUGCCACGGGGGUU | 2165 | AACCCCCGUGGCAGCAGCA |
| siRNA 116 | 116 | CUGCUGCCACGGGGGUUCC | 2167 | GGAACCCCCGUGGCAGCAG |
| siRNA 118 | 118 | GCUGCCACGGGGGUUCCAG | 2169 | CUGGAACCCCCGUGGCAGC |
| siRNA 122 | 122 | CCACGGGGGUUCCAGCCCC | 2173 | GGGGCUGGAACCCCCGUGG |
| siRNA 136 | 136 | GCCCCAGCCUGGCGGGAAC | 2187 | GUUCCCGCCAGGCUGGGGC |
| siRNA 137 | 137 | CCCCAGCCUGGCGGGAACC | 2188 | GGUUCCCGCCAGGCUGGGG |
| siRNA 140 | 140 | CAGCCUGGCGGGAACCGUA | 2191 | UACGGUUCCCGCCAGGCUG |
| siRNA 141 | 141 | AGCCUGGCGGGAACCGUAC | 2192 | GUACGGUUCCCGCCAGGCU |
| siRNA 143 | 143 | CCUGGCGGGAACCGUACGG | 2194 | CCGUACGGUUCCCGCCAGG |
| siRNA 144 | 144 | CUGGCGGGAACCGUACGGA | 2195 | UCCGUACGGUUCCCGCCAG |
| siRNA 145 | 145 | UGGCGGGAACCGUACGGAG | 2196 | CUCCGUACGGUUCCCGCCA |
| siRNA 146 | 146 | GGCGGGAACCGUACGGAGU | 2197 | ACUCCGUACGGUUCCCGCC |
| siRNA 149 | 149 | GGGAACCGUACGGAGUCCC | 2200 | GGGACUCCGUACGGUUCCC |
| siRNA 150 | 150 | GGAACCGUACGGAGUCCCC | 2201 | GGGGACUCCGUACGGUUCC |
| siRNA 152 | 152 | AACCGUACGGAGUCCCCAG | 2203 | CUGGGGACUCCGUACGGUU |
| siRNA 154 | 154 | CCGUACGGAGUCCCCAGAA | 2205 | UUCUGGGGACUCCGUACGG |
| siRNA 155 | 155 | CGUACGGAGUCCCCAGAAC | 2206 | GUUCUGGGGACUCCGUACG |
| siRNA 158 | 158 | ACGGAGUCCCCAGAACCUA | 2209 | UAGGUUCUGGGGACUCCGU |
| siRNA 160 | 160 | GGAGUCCCCAGAACCUAAU | 2211 | AUUAGGUUCUGGGGACUCC |
| siRNA 165 | 165 | CCCCAGAACCUAAUGCCAC | 2216 | GUGGCAUUAGGUUCUGGGG |
| siRNA 166 | 166 | CCCAGAACCUAAUGCCACA | 2217 | UGUGGCAUUAGGUUCUGGG |
| siRNA 167 | 167 | CCAGAACCUAAUGCCACAG | 2218 | CUGUGGCAUUAGGUUCUGG |
| siRNA 172 | 172 | ACCUAAUGCCACAGCGACC | 2223 | GGUCGCUGUGGCAUUAGGU |
| siRNA 173 | 173 | CCUAAUGCCACAGCGACCC | 2224 | GGGUCGCUGUGGCAUUAGG |
| siRNA 199 | 199 | CCCCACUAUCCUGGUGACC | 2250 | GGUCACCAGGAUAGUGGGG |
| siRNA 202 | 202 | CACUAUCCUGGUGACCUCU | 2253 | AGAGGUCACCAGGAUAGUG |
| siRNA 203 | 203 | ACUAUCCUGGUGACCUCUG | 2254 | CAGAGGUCACCAGGAUAGU |
| siRNA 205 | 205 | UAUCCUGGUGACCUCUGUG | 2256 | CACAGAGGUCACCAGGAUA |
| siRNA 232 | 232 | GACCCCAGCAACAAGUGCU | 2283 | AGCACUUGUUGCUGGGGUC |
| siRNA 294 | 294 | CCAGGGCAGUUCCCUCGAG | 2345 | CUCGAGGGAACUGCCCUGG |
| siRNA 295 | 295 | CAGGGCAGUUCCCUCGAGC | 2346 | GCUCGAGGGAACUGCCCUG |
| siRNA 296 | 296 | AGGGCAGUUCCCUCGAGCA | 2347 | UGCUCGAGGGAACUGCCCU |
| siRNA 301 | 301 | AGUUCCCUCGAGCAGUAGC | 2352 | GCUACUGCUCGAGGGAACU |
| siRNA 303 | 303 | UUCCCUCGAGCAGUAGCCC | 2354 | GGGCUACUGCUCGAGGGAA |
| siRNA 304 | 304 | UCCCUCGAGCAGUAGCCCC | 2355 | GGGGCUACUGCUCGAGGGA |
| siRNA 305 | 305 | CCCUCGAGCAGUAGCCCCC | 2356 | GGGGGCUACUGCUCGAGGG |
| siRNA 315 | 315 | GUAGCCCCCAGGCCCAAGC | 2366 | GCUUGGGCCUGGGGGCUAC |
| siRNA 328 | 328 | CCAAGCACUCACCGAGGAC | 2379 | GUCCUCGGUGAGUGCUUGG |
| siRNA 334 | 334 | ACUCACCGAGGACGGGAGG | 2385 | CCUCCCGUCCUCGGUGAGU |
| siRNA 335 | 335 | CUCACCGAGGACGGGAGGC | 2386 | GCCUCCCGUCCUCGGUGAG |
| siRNA 336 | 336 | UCACCGAGGACGGGAGGCC | 2387 | GGCCUCCCGUCCUCGGUGA |
| siRNA 360 | 360 | GGUUCCCCUUCCGCUACGG | 2411 | CCGUAGCGGAAGGGGAACC |
| siRNA 361 | 361 | GUUCCCCUUCCGCUACGGG | 2412 | CCCGUAGCGGAAGGGGAAC |
| siRNA 362 | 362 | UUCCCCUUCCGCUACGGGG | 2413 | CCCCGUAGCGGAAGGGGAA |
| siRNA 363 | 363 | UCCCCUUCCGCUACGGGGG | 2414 | CCCCCGUAGCGGAAGGGGA |
| siRNA 364 | 364 | CCCCUUCCGCUACGGGGGC | 2415 | GCCCCCGUAGCGGAAGGGG |
| siRNA 367 | 367 | CUUCCGCUACGGGGGCCGC | 2418 | GCGGCCCCCGUAGCGGAAG |
| siRNA 371 | 371 | CGCUACGGGGGCCGCAUGC | 2422 | GCAUGCGGCCCCCGUAGCG |
| siRNA 372 | 372 | GCUACGGGGGCCGCAUGCU | 2423 | AGCAUGCGGCCCCCGUAGC |
| siRNA 373 | 373 | CUACGGGGGCCGCAUGCUG | 2424 | CAGCAUGCGGCCCCCGUAG |
| SiRNA 374 | 374 | UACGGGGGCCGCAUGCUGC | 2425 | GCAGCAUGCGGCCCCCGUA |
| siRNA 378 | 378 | GGGGCCGCAUGCUGCAUGC | 2429 | GCAUGCAGCAUGCGGCCCC |
| siRNA 389 | 389 | CUGCAUGCCUGCACUUCGG | 2440 | CCGAAGUGCAGGCAUGCAG |
| siRNA 390 | 390 | UGCAUGCCUGCACUUCGGA | 2441 | UCCGAAGUGCAGGCAUGCA |
| siRNA 391 | 391 | GCAUGCCUGCACUUCGGAG | 2442 | CUCCGAAGUGCAGGCAUGC |
| siRNA 395 | 395 | GCCUGCACUUCGGAGGGCA | 2446 | UGCCCUCCGAAGUGCAGGC |
| siRNA 398 | 398 | UGCACUUCGGAGGGCAGUG | 2449 | CACUGCCCUCCGAAGUGCA |
| siRNA 431 | 431 | UGUGCCACAACUCACAACU | 2482 | AGUUGUGAGUUGUGGCACA |
| siRNA 434 | 434 | GCCACAACUCACAACUACG | 2485 | CGUAGUUGUGAGUUGUGGC |
| siRNA 436 | 436 | CACAACUCACAACUACGAC | 2487 | GUCGUAGUUGUGAGUUGUG |
| siRNA 437 | 437 | ACAACUCACAACUACGACC | 2488 | GGUCGUAGUUGUGAGUUGU |
| siRNA 438 | 438 | CAACUCACAACUACGACCG | 2489 | CGGUCGUAGUUGUGAGUUG |
| siRNA 442 | 442 | UCACAACUACGACCGGGAC | 2493 | GUCCCGGUCGUAGUUGUGA |
| siRNA 443 | 443 | CACAACUACGACCGGGACA | 2494 | UGUCCCGGUCGUAGUUGUG |
| siRNA 445 | 445 | CAACUACGACCGGGACAGG | 2496 | CCUGUCCCGGUCGUAGUUG |
| siRNA 446 | 446 | AACUACGACCGGGACAGGG | 2497 | CCCUGUCCCGGUCGUAGUU |
| siRNA 469 | 469 | GGGCUACUGUGUGGAGGCC | 2520 | GGCCUCCACACAGUAGCCC |
| siRNA 472 | 472 | CUACUGUGUGGAGGCCACC | 2523 | GGUGGCCUCCACACAGUAG |
| siRNA 473 | 473 | UACUGUGUGGAGGCCACCC | 2524 | GGGUGGCCUCCACACAGUA |
| siRNA 530 | 530 | UCCGGCCCCUGCCUCAAUG | 2581 | CAUUGAGGCAGGGGCCGGA |
| siRNA 531 | 531 | CCGGCCCCUGCCUCAAUGG | 2582 | CCAUUGAGGCAGGGGCCGG |
| siRNA 533 | 533 | GGCCCCUGCCUCAAUGGAG | 2584 | CUCCAUUGAGGCAGGGGCC |
| siRNA 549 | 549 | GAGGCUCCUGCUCCAAUAC | 2600 | GUAUUGGAGCAGGAGCCUC |
| siRNA 558 | 558 | GCUCCAAUACCCAGGACCC | 2609 | GGGUCCUGGGUAUUGGAGC |
| siRNA 562 | 562 | CAAUACCCAGGACCCCCAG | 2613 | CUGGGGGUCCUGGGUAUUG |
| siRNA 564 | 564 | AUACCCAGGACCCCCAGUC | 2615 | GACUGGGGGUCCUGGGUAU |
| siRNA 569 | 569 | CAGGACCCCCAGUCCUAUC | 2620 | GAUAGGACUGGGGGUCCUG |
| siRNA 575 | 575 | CCCCAGUCCUAUCACUGCA | 2626 | UGCAGUGAUAGGACUGGGG |
| siRNA 601 | 601 | CCGGGCCUUCACCGGCAAG | 2652 | CUUGCCGGUGAAGGCCCGG |
| siRNA 602 | 602 | CGGGCCUUCACCGGCAAGG | 2653 | CCUUGCCGGUGAAGGCCCG |
| siRNA 603 | 603 | GGGCCUUCACCGGCAAGGA | 2654 | UCCUUGCCGGUGAAGGCCC |
| siRNA 604 | 604 | GGCCUUCACCGGCAAGGAC | 2655 | GUCCUUGCCGGUGAAGGCC |
| siRNA 610 | 610 | CACCGGCAAGGACUGCGGC | 2661 | GCCGCAGUCCUUGCCGGUG |
| siRNA 612 | 612 | CCGGCAAGGACUGCGGCAC | 2663 | GUGCCGCAGUCCUUGCCGG |
| siRNA 616 | 616 | CAAGGACUGCGGCACAGAG | 2667 | CUCUGUGCCGCAGUCCUUG |
| siRNA 624 | 624 | GCGGCACAGAGAAAUGCUU | 2675 | AAGCAUUUCUCUGUGCCGC |
| siRNA 628 | 628 | CACAGAGAAAUGCUUUGAU | 2679 | AUCAAAGCAUUUCUCUGUG |
| siRNA 729 | 729 | GGGGCCGGACCUGGUGCGA | 2780 | UCGCACCAGGUCCGGCCCC |
| siRNA 730 | 730 | GGGCCGGACCUGGUGCGAA | 2781 | UUCGCACCAGGUCCGGCCC |
| siRNA 732 | 732 | GCCGGACCUGGUGCGAAGG | 2783 | CCUUCGCACCAGGUCCGGC |
| siRNA 733 | 733 | CCGGACCUGGUGCGAAGGC | 2784 | GCCUUCGCACCAGGUCCGG |
| siRNA 735 | 735 | GGACCUGGUGCGAAGGCAC | 2786 | GUGCCUUCGCACCAGGUCC |
| siRNA 736 | 736 | GACCUGGUGCGAAGGCACC | 2787 | GGUGCCUUCGCACCAGGUC |
| siRNA 737 | 737 | ACCUGGUGCGAAGGCACCC | 2788 | GGGUGCCUUCGCACCAGGU |
| siRNA 738 | 738 | CCUGGUGCGAAGGCACCCG | 2789 | CGGGUGCCUUCGCACCAGG |
| siRNA 742 | 742 | GUGCGAAGGCACCCGACAU | 2793 | AUGUCGGGUGCCUUCGCAC |
| siRNA 743 | 743 | UGCGAAGGCACCCGACAUA | 2794 | UAUGUCGGGUGCCUUCGCA |
| siRNA 744 | 744 | GCGAAGGCACCCGACAUAC | 2795 | GUAUGUCGGGUGCCUUCGC |
| siRNA 745 | 745 | CGAAGGCACCCGACAUACA | 2796 | UGUAUGUCGGGUGCCUUCG |
| siRNA 747 | 747 | AAGGCACCCGACAUACAGC | 2798 | GCUGUAUGUCGGGUGCCUU |
| siRNA 748 | 748 | AGGCACCCGACAUACAGCU | 2799 | AGCUGUAUGUCGGGUGCCU |
| siRNA 749 | 749 | GGCACCCGACAUACAGCUU | 2800 | AAGCUGUAUGUCGGGUGCC |
| siRNA 751 | 751 | CACCCGACAUACAGCUUGU | 2802 | ACAAGCUGUAUGUCGGGUG |
| siRNA 753 | 753 | CCCGACAUACAGCUUGUCU | 2804 | AGACAAGCUGUAUGUCGGG |
| siRNA 754 | 754 | CCGACAUACAGCUUGUCUG | 2805 | CAGACAAGCUGUAUGUCGG |
| siRNA 755 | 755 | CGACAUACAGCUUGUCUGA | 2806 | UCAGACAAGCUGUAUGUCG |
| siRNA 756 | 756 | GACAUACAGCUUGUCUGAG | 2807 | CUCAGACAAGCUGUAUGUC |
| siRNA 757 | 757 | ACAUACAGCUUGUCUGAGC | 2808 | GCUCAGACAAGCUGUAUGU |
| siRNA 758 | 758 | CAUACAGCUUGUCUGAGCA | 2809 | UGCUCAGACAAGCUGUAUG |
| siRNA 776 | 776 | AGCCCUUGCCUGAACGGGG | 2827 | CCCCGUUCAGGCAAGGGCU |
| siRNA 796 | 796 | CACCUGCCACCUGAUCGUG | 2847 | CACGAUCAGGUGGCAGGUG |
| siRNA 799 | 799 | CUGCCACCUGAUCGUGGCC | 2850 | GGCCACGAUCAGGUGGCAG |
| siRNA 810 | 810 | UCGUGGCCACCGGGACCAC | 2861 | GUGGUCCCGGUGGCCACGA |
| siRNA 819 | 819 | CCGGGACCACCGUGUGUGC | 2870 | GCACACACGGUGGUCCCGG |
| siRNA 848 | 848 | GGCUUCGCUGGACGGCUCU | 2899 | AGAGCCGUCCAGCGAAGCC |
| siRNA 853 | 853 | CGCUGGACGGCUCUGCAAC | 2904 | GUUGCAGAGCCGUCCAGCG |
| siRNA 855 | 855 | CUGGACGGCUCUGCAACAU | 2906 | AUGUUGCAGAGCCGUCCAG |
| siRNA 857 | 857 | GGACGGCUCUGCAACAUCG | 2908 | CGAUGUUGCAGAGCCGUCC |
| siRNA 858 | 858 | GACGGCUCUGCAACAUCGA | 2909 | UCGAUGUUGCAGAGCCGUC |
| siRNA 859 | 859 | ACGGCUCUGCAACAUCGAG | 2910 | CUCGAUGUUGCAGAGCCGU |
| siRNA 861 | 861 | GGCUCUGCAACAUCGAGCC | 2912 | GGCUCGAUGUUGCAGAGCC |
| siRNA 862 | 862 | GCUCUGCAACAUCGAGCCU | 2913 | AGGCUCGAUGUUGCAGAGC |
| siRNA 863 | 863 | CUCUGCAACAUCGAGCCUG | 2914 | CAGGCUCGAUGUUGCAGAG |
| siRNA 871 | 871 | CAUCGAGCCUGAUGAGCGC | 2922 | GCGCUCAUCAGGCUCGAUG |
| siRNA 872 | 872 | AUCGAGCCUGAUGAGCGCU | 2923 | AGCGCUCAUCAGGCUCGAU |
| siRNA 873 | 873 | UCGAGCCUGAUGAGCGCUG | 2924 | CAGCGCUCAUCAGGCUCGA |
| siRNA 875 | 875 | GAGCCUGAUGAGCGCUGCU | 2926 | AGCAGCGCUCAUCAGGCUC |
| siRNA 879 | 879 | CUGAUGAGCGCUGCUUCUU | 2930 | AAGAAGCAGCGCUCAUCAG |
| siRNA 896 | 896 | UUGGGGAACGGCACUGGGU | 2947 | ACCCAGUGCCGUUCCCCAA |
| siRNA 901 | 901 | GAACGGCACUGGGUACCGU | 2952 | ACGGUACCCAGUGCCGUUC |
| siRNA 902 | 902 | AACGGCACUGGGUACCGUG | 2953 | CACGGUACCCAGUGCCGUU |
| siRNA 908 | 908 | ACUGGGUACCGUGGCGUGG | 2959 | CCACGCCACGGUACCCAGU |
| siRNA 909 | 909 | CUGGGUACCGUGGCGUGGC | 2960 | GCCACGCCACGGUACCCAG |
| siRNA 910 | 910 | UGGGUACCGUGGCGUGGCC | 2961 | GGCCACGCCACGGUACCCA |
| siRNA 911 | 911 | GGGUACCGUGGCGUGGCCA | 2962 | UGGCCACGCCACGGUACCC |
| siRNA 912 | 912 | GGUACCGUGGCGUGGCCAG | 2963 | CUGGCCACGCCACGGUACC |
| siRNA 913 | 913 | GUACCGUGGCGUGGCCAGC | 2964 | GCUGGCCACGCCACGGUAC |
| siRNA 916 | 916 | CCGUGGCGUGGCCAGCACC | 2967 | GGUGCUGGCCACGCCACGG |
| siRNA 957 | 957 | UGGCCUGGAACUCCGAUCU | 3008 | AGAUCGGAGUUCCAGGCCA |
| SiRNA 959 | 959 | GCCUGGAACUCCGAUCUGC | 3010 | GCAGAUCGGAGUUCCAGGC |
| siRNA 960 | 960 | CCUGGAACUCCGAUCUGCU | 3011 | AGCAGAUCGGAGUUCCAGG |
| siRNA 961 | 961 | CUGGAACUCCGAUCUGCUC | 3012 | GAGCAGAUCGGAGUUCCAG |
| siRNA 962 | 962 | UGGAACUCCGAUCUGCUCU | 3013 | AGAGCAGAUCGGAGUUCCA |
| siRNA 964 | 964 | GAACUCCGAUCUGCUCUAC | 3015 | GUAGAGCAGAUCGGAGUUC |
| siRNA 965 | 965 | AACUCCGAUCUGCUCUACC | 3016 | GGUAGAGCAGAUCGGAGUU |
| siRNA 992 | 992 | CACGUGGACUCCGUGGGCG | 3043 | CGCCCACGGAGUCCACGUG |
| siRNA 996 | 996 | UGGACUCCGUGGGCGCCGC | 3047 | GCGGCGCCCACGGAGUCCA |
| siRNA 998 | 998 | GACUCCGUGGGCGCCGCGG | 3049 | CCGCGGCGCCCACGGAGUC |
| siRNA 1027 | 1027 | CCUGGGCCCCCAUGCCUAC | 3078 | GUAGGCAUGGGGGCCCAGG |
| siRNA 1028 | 1028 | CUGGGCCCCCAUGCCUACU | 3079 | AGUAGGCAUGGGGGCCCAG |
| siRNA 1033 | 1033 | CCCCCAUGCCUACUGCCGG | 3084 | CCGGCAGUAGGCAUGGGGG |
| siRNA 1034 | 1034 | CCCCAUGCCUACUGCCGGA | 3085 | UCCGGCAGUAGGCAUGGGG |
| siRNA 1035 | 1035 | CCCAUGCCUACUGCCGGAA | 3086 | UUCCGGCAGUAGGCAUGGG |
| siRNA 1039 | 1039 | UGCCUACUGCCGGAAUCCG | 3090 | CGGAUUCCGGCAGUAGGCA |
| siRNA 1040 | 1040 | GCCUACUGCCGGAAUCCGG | 3091 | CCGGAUUCCGGCAGUAGGC |
| siRNA 1041 | 1041 | CCUACUGCCGGAAUCCGGA | 3092 | UCCGGAUUCCGGCAGUAGG |
| siRNA 1042 | 1042 | CUACUGCCGGAAUCCGGAC | 3093 | GUCCGGAUUCCGGCAGUAG |
| siRNA 1043 | 1043 | UACUGCCGGAAUCCGGACA | 3094 | UGUCCGGAUUCCGGCAGUA |
| siRNA 1047 | 1047 | GCCGGAAUCCGGACAAUGA | 3098 | UCAUUGUCCGGAUUCCGGC |
| siRNA 1048 | 1048 | CCGGAAUCCGGACAAUGAC | 3099 | GUCAUUGUCCGGAUUCCGG |
| siRNA 1050 | 1050 | GGAAUCCGGACAAUGACGA | 3101 | UCGUCAUUGUCCGGAUUCC |
| siRNA 1051 | 1051 | GAAUCCGGACAAUGACGAG | 3102 | CUCGUCAUUGUCCGGAUUC |
| siRNA 1052 | 1052 | AAUCCGGACAAUGACGAGA | 3103 | UCUCGUCAUUGUCCGGAUU |
| siRNA 1053 | 1053 | AUCCGGACAAUGACGAGAG | 3104 | CUCUCGUCAUUGUCCGGAU |
| siRNA 1054 | 1054 | UCCGGACAAUGACGAGAGG | 3105 | CCUCUCGUCAUUGUCCGGA |
| siRNA 1055 | 1055 | CCGGACAAUGACGAGAGGC | 3106 | GCCUCUCGUCAUUGUCCGG |
| siRNA 1067 | 1067 | GAGAGGCCCUGGUGCUACG | 3118 | CGUAGCACCAGGGCCUCUC |
| siRNA 1100 | 1100 | GCGCUCUCCUGGGAGUACU | 3151 | AGUACUCCCAGGAGAGCGC |
| siRNA 1106 | 1106 | UCCUGGGAGUACUGCCGCC | 3157 | GGCGGCAGUACUCCCAGGA |
| siRNA 1121 | 1121 | CGCCUGGAGGCCUGCGAAU | 3172 | AUUCGCAGGCCUCCAGGCG |
| siRNA 1122 | 1122 | GCCUGGAGGCCUGCGAAUC | 3173 | GAUUCGCAGGCCUCCAGGC |
| siRNA 1123 | 1123 | CCUGGAGGCCUGCGAAUCC | 3174 | GGAUUCGCAGGCCUCCAGG |
| siRNA 1131 | 1131 | CCUGCGAAUCCCUCACCAG | 3182 | CUGGUGAGGGAUUCGCAGG |
| siRNA 1133 | 1133 | UGCGAAUCCCUCACCAGAG | 3184 | CUCUGGUGAGGGAUUCGCA |
| siRNA 1136 | 1136 | GAAUCCCUCACCAGAGUCC | 3187 | GGACUCUGGUGAGGGAUUC |
| siRNA 1141 | 1141 | CCUCACCAGAGUCCAACUG | 3192 | CAGUUGGACUCUGGUGAGG |
| siRNA 1143 | 1143 | UCACCAGAGUCCAACUGUC | 3194 | GACAGUUGGACUCUGGUGA |
| siRNA 1144 | 1144 | CACCAGAGUCCAACUGUCA | 3195 | UGACAGUUGGACUCUGGUG |
| siRNA 1149 | 1149 | GAGUCCAACUGUCACCGGA | 3200 | UCCGGUGACAGUUGGACUC |
| siRNA 1151 | 1151 | GUCCAACUGUCACCGGAUC | 3202 | GAUCCGGUGACAGUUGGAC |
| siRNA 1152 | 1152 | UCCAACUGUCACCGGAUCU | 3203 | AGAUCCGGUGACAGUUGGA |
| siRNA 1153 | 1153 | CCAACUGUCACCGGAUCUC | 3204 | GAGAUCCGGUGACAGUUGG |
| siRNA 1161 | 1161 | CACCGGAUCUCCUGGCGAC | 3212 | GUCGCCAGGAGAUCCGGUG |
| siRNA 1166 | 1166 | GAUCUCCUGGCGACCCUGC | 3217 | GCAGGGUCGCCAGGAGAUC |
| siRNA 1168 | 1168 | UCUCCUGGCGACCCUGCCU | 3219 | AGGCAGGGUCGCCAGGAGA |
| siRNA 1203 | 1203 | GGCGCCAGGCCUGCGGCAG | 3254 | CUGCCGCAGGCCUGGCGCC |
| siRNA 1215 | 1215 | GCGGCAGGAGGCACAAGAA | 3266 | UUCUUGUGCCUCCUGCCGC |
| siRNA 1224 | 1224 | GGCACAAGAAGAGGACGUU | 3275 | AACGUCCUCUUCUUGUGCC |
| siRNA 1225 | 1225 | GCACAAGAAGAGGACGUUC | 3276 | GAACGUCCUCUUCUUGUGC |
| siRNA 1226 | 1226 | CACAAGAAGAGGACGUUCC | 3277 | GGAACGUCCUCUUCUUGUG |
| siRNA 1235 | 1235 | AGGACGUUCCUGCGGCCAC | 3286 | GUGGCCGCAGGAACGUCCU |
| siRNA 1236 | 1236 | GGACGUUCCUGCGGCCACG | 3287 | CGUGGCCGCAGGAACGUCC |
| siRNA 1238 | 1238 | ACGUUCCUGCGGCCACGUA | 3289 | UACGUGGCCGCAGGAACGU |
| siRNA 1240 | 1240 | GUUCCUGCGGCCACGUAUC | 3291 | GAUACGUGGCCGCAGGAAC |
| siRNA 1242 | 1242 | UCCUGCGGCCACGUAUCAU | 3293 | AUGAUACGUGGCCGCAGGA |
| siRNA 1243 | 1243 | CCUGCGGCCACGUAUCAUC | 3294 | GAUGAUACGUGGCCGCAGG |
| SiRNA 1244 | 1244 | CUGCGGCCACGUAUCAUCG | 3295 | CGAUGAUACGUGGCCGCAG |
| siRNA 1246 | 1246 | GCGGCCACGUAUCAUCGGC | 3297 | GCCGAUGAUACGUGGCCGC |
| siRNA 1247 | 1247 | CGGCCACGUAUCAUCGGCG | 3298 | CGCCGAUGAUACGUGGCCG |
| siRNA 1248 | 1248 | GGCCACGUAUCAUCGGCGG | 3299 | CCGCCGAUGAUACGUGGCC |
| siRNA 1249 | 1249 | GCCACGUAUCAUCGGCGGC | 3300 | GCCGCCGAUGAUACGUGGC |
| siRNA 1250 | 1250 | CCACGUAUCAUCGGCGGCU | 3301 | AGCCGCCGAUGAUACGUGG |
| siRNA 1251 | 1251 | CACGUAUCAUCGGCGGCUC | 3302 | GAGCCGCCGAUGAUACGUG |
| siRNA 1274 | 1274 | UCGCUGCCCGGCUCGCACC | 3325 | GGUGCGAGCCGGGCAGCGA |
| SiRNA 1299 | 1299 | UGGCCGCCAUCUACAUCGG | 3350 | CCGAUGUAGAUGGCGGCCA |
| siRNA 1303 | 1303 | CGCCAUCUACAUCGGGGAC | 3354 | GUCCCCGAUGUAGAUGGCG |
| siRNA 1307 | 1307 | AUCUACAUCGGGGACAGCU | 3358 | AGCUGUCCCCGAUGUAGAU |
| siRNA 1309 | 1309 | CUACAUCGGGGACAGCUUC | 3360 | GAAGCUGUCCCCGAUGUAG |
| siRNA 1310 | 1310 | UACAUCGGGGACAGCUUCU | 3361 | AGAAGCUGUCCCCGAUGUA |
| siRNA 1312 | 1312 | CAUCGGGGACAGCUUCUGC | 3363 | GCAGAAGCUGUCCCCGAUG |
| siRNA 1314 | 1314 | UCGGGGACAGCUUCUGCGC | 3365 | GCGCAGAAGCUGUCCCCGA |
| siRNA 1315 | 1315 | CGGGGACAGCUUCUGCGCC | 3366 | GGCGCAGAAGCUGUCCCCG |
| siRNA 1318 | 1318 | GGACAGCUUCUGCGCCGGG | 3369 | CCCGGCGCAGAAGCUGUCC |
| siRNA 1319 | 1319 | GACAGCUUCUGCGCCGGGA | 3370 | UCCCGGCGCAGAAGCUGUC |
| siRNA 1352 | 1352 | UGCUGGGUGGUGUCGGCCG | 3403 | CGGCCGACACCACCCAGCA |
| siRNA 1353 | 1353 | GCUGGGUGGUGUCGGCCGC | 3404 | GCGGCCGACACCACCCAGC |
| siRNA 1379 | 1379 | UUCUCCCACAGCCCCCCCA | 3430 | UGGGGGGGCUGUGGGAGAA |
| siRNA 1389 | 1389 | GCCCCCCCAGGGACAGCGU | 3440 | ACGCUGUCCCUGGGGGGGC |
| siRNA 1390 | 1390 | CCCCCCCAGGGACAGCGUC | 3441 | GACGCUGUCCCUGGGGGGG |
| siRNA 1392 | 1392 | CCCCCAGGGACAGCGUCUC | 3443 | GAGACGCUGUCCCUGGGGG |
| siRNA 1424 | 1424 | CAGCACUUCUUCAACCGCA | 3475 | UGCGGUUGAAGAAGUGCUG |
| siRNA 1427 | 1427 | CACUUCUUCAACCGCACGA | 3478 | UCGUGCGGUUGAAGAAGUG |
| siRNA 1428 | 1428 | ACUUCUUCAACCGCACGAC | 3479 | GUCGUGCGGUUGAAGAAGU |
| SiRNA 1429 | 1429 | CUUCUUCAACCGCACGACG | 3480 | CGUCGUGCGGUUGAAGAAG |
| siRNA 1430 | 1430 | UUCUUCAACCGCACGACGG | 3481 | CCGUCGUGCGGUUGAAGAA |
| siRNA 1431 | 1431 | UCUUCAACCGCACGACGGA | 3482 | UCCGUCGUGCGGUUGAAGA |
| siRNA 1432 | 1432 | CUUCAACCGCACGACGGAC | 3483 | GUCCGUCGUGCGGUUGAAG |
| siRNA 1433 | 1433 | UUCAACCGCACGACGGACG | 3484 | CGUCCGUCGUGCGGUUGAA |
| siRNA 1434 | 1434 | UCAACCGCACGACGGACGU | 3485 | ACGUCCGUCGUGCGGUUGA |
| siRNA 1435 | 1435 | CAACCGCACGACGGACGUG | 3486 | CACGUCCGUCGUGCGGUUG |
| SiRNA 1436 | 1436 | AACCGCACGACGGACGUGA | 3487 | UCACGUCCGUCGUGCGGUU |
| siRNA 1438 | 1438 | CCGCACGACGGACGUGACG | 3489 | CGUCACGUCCGUCGUGCGG |
| siRNA 1439 | 1439 | CGCACGACGGACGUGACGC | 3490 | GCGUCACGUCCGUCGUGCG |
| siRNA 1440 | 1440 | GCACGACGGACGUGACGCA | 3491 | UGCGUCACGUCCGUCGUGC |
| siRNA 1441 | 1441 | CACGACGGACGUGACGCAG | 3492 | CUGCGUCACGUCCGUCGUG |
| siRNA 1442 | 1442 | ACGACGGACGUGACGCAGA | 3493 | UCUGCGUCACGUCCGUCGU |
| siRNA 1443 | 1443 | CGACGGACGUGACGCAGAC | 3494 | GUCUGCGUCACGUCCGUCG |
| siRNA 1445 | 1445 | ACGGACGUGACGCAGACCU | 3496 | AGGUCUGCGUCACGUCCGU |
| siRNA 1446 | 1446 | CGGACGUGACGCAGACCUU | 3497 | AAGGUCUGCGUCACGUCCG |
| siRNA 1447 | 1447 | GGACGUGACGCAGACCUUC | 3498 | GAAGGUCUGCGUCACGUCC |
| SiRNA 1449 | 1449 | ACGUGACGCAGACCUUCGG | 3500 | CCGAAGGUCUGCGUCACGU |
| siRNA 1452 | 1452 | UGACGCAGACCUUCGGCAU | 3503 | AUGCCGAAGGUCUGCGUCA |
| siRNA 1453 | 1453 | GACGCAGACCUUCGGCAUC | 3504 | GAUGCCGAAGGUCUGCGUC |
| siRNA 1455 | 1455 | CGCAGACCUUCGGCAUCGA | 3506 | UCGAUGCCGAAGGUCUGCG |
| siRNA 1456 | 1456 | GCAGACCUUCGGCAUCGAG | 3507 | CUCGAUGCCGAAGGUCUGC |
| siRNA 1459 | 1459 | GACCUUCGGCAUCGAGAAG | 3510 | CUUCUCGAUGCCGAAGGUC |
| siRNA 1460 | 1460 | ACCUUCGGCAUCGAGAAGU | 3511 | ACUUCUCGAUGCCGAAGGU |
| siRNA 1463 | 1463 | UUCGGCAUCGAGAAGUACA | 3514 | UGUACUUCUCGAUGCCGAA |
| SiRNA 1464 | 1464 | UCGGCAUCGAGAAGUACAU | 3515 | AUGUACUUCUCGAUGCCGA |
| siRNA 1469 | 1469 | AUCGAGAAGUACAUCCCGU | 3520 | ACGGGAUGUACUUCUCGAU |
| SiRNA 1470 | 1470 | UCGAGAAGUACAUCCCGUA | 3521 | UACGGGAUGUACUUCUCGA |
| siRNA 1471 | 1471 | CGAGAAGUACAUCCCGUAC | 3522 | GUACGGGAUGUACUUCUCG |
| SiRNA 1474 | 1474 | GAAGUACAUCCCGUACACC | 3525 | GGUGUACGGGAUGUACUUC |
| siRNA 1475 | 1475 | AAGUACAUCCCGUACACCC | 3526 | GGGUGUACGGGAUGUACUU |
| siRNA 1476 | 1476 | AGUACAUCCCGUACACCCU | 3527 | AGGGUGUACGGGAUGUACU |
| siRNA 1477 | 1477 | GUACAUCCCGUACACCCUG | 3528 | CAGGGUGUACGGGAUGUAC |
| siRNA 1478 | 1478 | UACAUCCCGUACACCCUGU | 3529 | ACAGGGUGUACGGGAUGUA |
| siRNA 1504 | 1504 | GUUCAACCCCAGCGACCAC | 3555 | GUGGUCGCUGGGGUUGAAC |
| siRNA 1506 | 1506 | UCAACCCCAGCGACCACGA | 3557 | UCGUGGUCGCUGGGGUUGA |
| siRNA 1507 | 1507 | CAACCCCAGCGACCACGAC | 3558 | GUCGUGGUCGCUGGGGUUG |
| siRNA 1509 | 1509 | ACCCCAGCGACCACGACCU | 3560 | AGGUCGUGGUCGCUGGGGU |
| siRNA 1512 | 1512 | CCAGCGACCACGACCUCGU | 3563 | ACGAGGUCGUGGUCGCUGG |
| siRNA 1513 | 1513 | CAGCGACCACGACCUCGUC | 3564 | GACGAGGUCGUGGUCGCUG |
| siRNA 1516 | 1516 | CGACCACGACCUCGUCCUG | 3567 | CAGGACGAGGUCGUGGUCG |
| siRNA 1518 | 1518 | ACCACGACCUCGUCCUGAU | 3569 | AUCAGGACGAGGUCGUGGU |
| siRNA 1519 | 1519 | CCACGACCUCGUCCUGAUC | 3570 | GAUCAGGACGAGGUCGUGG |
| siRNA 1521 | 1521 | ACGACCUCGUCCUGAUCCG | 3572 | CGGAUCAGGACGAGGUCGU |
| siRNA 1523 | 1523 | GACCUCGUCCUGAUCCGGC | 3574 | GCCGGAUCAGGACGAGGUC |
| siRNA 1524 | 1524 | ACCUCGUCCUGAUCCGGCU | 3575 | AGCCGGAUCAGGACGAGGU |
| siRNA 1528 | 1528 | CGUCCUGAUCCGGCUGAAG | 3579 | CUUCAGCCGGAUCAGGACG |
| siRNA 1562 | 1562 | UGUGCCACACGCUCGCAGU | 3613 | ACUGCGAGCGUGUGGCACA |
| siRNA 1563 | 1563 | GUGCCACACGCUCGCAGUU | 3614 | AACUGCGAGCGUGUGGCAC |
| siRNA 1564 | 1564 | UGCCACACGCUCGCAGUUC | 3615 | GAACUGCGAGCGUGUGGCA |
| siRNA 1565 | 1565 | GCCACACGCUCGCAGUUCG | 3616 | CGAACUGCGAGCGUGUGGC |
| siRNA 1566 | 1566 | CCACACGCUCGCAGUUCGU | 3617 | ACGAACUGCGAGCGUGUGG |
| siRNA 1567 | 1567 | CACACGCUCGCAGUUCGUG | 3618 | CACGAACUGCGAGCGUGUG |
| siRNA 1568 | 1568 | ACACGCUCGCAGUUCGUGC | 3619 | GCACGAACUGCGAGCGUGU |
| siRNA 1572 | 1572 | GCUCGCAGUUCGUGCAGCC | 3623 | GGCUGCACGAACUGCGAGC |
| siRNA 1574 | 1574 | UCGCAGUUCGUGCAGCCCA | 3625 | UGGGCUGCACGAACUGCGA |
| siRNA 1615 | 1615 | CACCUUCCCCGCAGGACAC | 3666 | GUGUCCUGCGGGGAAGGUG |
| siRNA 1616 | 1616 | ACCUUCCCCGCAGGACACA | 3667 | UGUGUCCUGCGGGGAAGGU |
| siRNA 1617 | 1617 | CCUUCCCCGCAGGACACAA | 3668 | UUGUGUCCUGCGGGGAAGG |
| siRNA 1619 | 1619 | UUCCCCGCAGGACACAAGU | 3670 | ACUUGUGUCCUGCGGGGAA |
| siRNA 1621 | 1621 | CCCCGCAGGACACAAGUGC | 3672 | GCACUUGUGUCCUGCGGGG |
| siRNA 1622 | 1622 | CCCGCAGGACACAAGUGCC | 3673 | GGCACUUGUGUCCUGCGGG |
| siRNA 1623 | 1623 | CCGCAGGACACAAGUGCCA | 3674 | UGGCACUUGUGUCCUGCGG |
| siRNA 1624 | 1624 | CGCAGGACACAAGUGCCAG | 3675 | CUGGCACUUGUGUCCUGCG |
| siRNA 1628 | 1628 | GGACACAAGUGCCAGAUUG | 3679 | CAAUCUGGCACUUGUGUCC |
| siRNA 1630 | 1630 | ACACAAGUGCCAGAUUGCG | 3681 | CGCAAUCUGGCACUUGUGU |
| siRNA 1631 | 1631 | CACAAGUGCCAGAUUGCGG | 3682 | CCGCAAUCUGGCACUUGUG |
| siRNA 1635 | 1635 | AGUGCCAGAUUGCGGGCUG | 3686 | CAGCCCGCAAUCUGGCACU |
| siRNA 1636 | 1636 | GUGCCAGAUUGCGGGCUGG | 3687 | CCAGCCCGCAAUCUGGCAC |
| siRNA 1637 | 1637 | UGCCAGAUUGCGGGCUGGG | 3688 | CCCAGCCCGCAAUCUGGCA |
| siRNA 1643 | 1643 | AUUGCGGGCUGGGGCCACU | 3694 | AGUGGCCCCAGCCCGCAAU |
| siRNA 1651 | 1651 | CUGGGGCCACUUGGAUGAG | 3702 | CUCAUCCAAGUGGCCCCAG |
| siRNA 1662 | 1662 | UGGAUGAGAACGUGAGCGG | 3713 | CCGCUCACGUUCUCAUCCA |
| siRNA 1663 | 1663 | GGAUGAGAACGUGAGCGGC | 3714 | GCCGCUCACGUUCUCAUCC |
| siRNA 1664 | 1664 | GAUGAGAACGUGAGCGGCU | 3715 | AGCCGCUCACGUUCUCAUC |
| siRNA 1672 | 1672 | CGUGAGCGGCUACUCCAGC | 3723 | GCUGGAGUAGCCGCUCACG |
| siRNA 1707 | 1707 | UGGUCCCCCUGGUCGCCGA | 3758 | UCGGCGACCAGGGGGACCA |
| SiRNA 1708 | 1708 | GGUCCCCCUGGUCGCCGAC | 3759 | GUCGGCGACCAGGGGGACC |
| SiRNA 1709 | 1709 | GUCCCCCUGGUCGCCGACC | 3760 | GGUCGGCGACCAGGGGGAC |
| siRNA 1712 | 1712 | CCCCUGGUCGCCGACCACA | 3763 | UGUGGUCGGCGACCAGGGG |
| siRNA 1713 | 1713 | CCCUGGUCGCCGACCACAA | 3764 | UUGUGGUCGGCGACCAGGG |
| siRNA 1715 | 1715 | CUGGUCGCCGACCACAAGU | 3766 | ACUUGUGGUCGGCGACCAG |
| siRNA 1716 | 1716 | UGGUCGCCGACCACAAGUG | 3767 | CACUUGUGGUCGGCGACCA |
| siRNA 1717 | 1717 | GGUCGCCGACCACAAGUGC | 3768 | GCACUUGUGGUCGGCGACC |
| siRNA 1718 | 1718 | GUCGCCGACCACAAGUGCA | 3769 | UGCACUUGUGGUCGGCGAC |
| siRNA 1722 | 1722 | CCGACCACAAGUGCAGCAG | 3773 | CUGCUGCACUUGUGGUCGG |
| siRNA 1737 | 1737 | GCAGCCCUGAGGUCUACGG | 3788 | CCGUAGACCUCAGGGCUGC |
| siRNA 1739 | 1739 | AGCCCUGAGGUCUACGGCG | 3790 | CGCCGUAGACCUCAGGGCU |
| siRNA 1741 | 1741 | CCCUGAGGUCUACGGCGCC | 3792 | GGCGCCGUAGACCUCAGGG |
| siRNA 1743 | 1743 | CUGAGGUCUACGGCGCCGA | 3794 | UCGGCGCCGUAGACCUCAG |
| siRNA 1745 | 1745 | GAGGUCUACGGCGCCGACA | 3796 | UGUCGGCGCCGUAGACCUC |
| SiRNA 1749 | 1749 | UCUACGGCGCCGACAUCAG | 3800 | CUGAUGUCGGCGCCGUAGA |
| siRNA 1751 | 1751 | UACGGCGCCGACAUCAGCC | 3802 | GGCUGAUGUCGGCGCCGUA |
| siRNA 1752 | 1752 | ACGGCGCCGACAUCAGCCC | 3803 | GGGCUGAUGUCGGCGCCGU |
| siRNA 1753 | 1753 | CGGCGCCGACAUCAGCCCC | 3804 | GGGGCUGAUGUCGGCGCCG |
| siRNA 1759 | 1759 | CGACAUCAGCCCCAACAUG | 3810 | CAUGUUGGGGCUGAUGUCG |
| siRNA 1766 | 1766 | AGCCCCAACAUGCUCUGUG | 3817 | CACAGAGCAUGUUGGGGCU |
| siRNA 1770 | 1770 | CCAACAUGCUCUGUGCCGG | 3821 | CCGGCACAGAGCAUGUUGG |
| siRNA 1780 | 1780 | CUGUGCCGGCUACUUCGAC | 3831 | GUCGAAGUAGCCGGCACAG |
| siRNA 1781 | 1781 | UGUGCCGGCUACUUCGACU | 3832 | AGUCGAAGUAGCCGGCACA |
| siRNA 1782 | 1782 | GUGCCGGCUACUUCGACUG | 3833 | CAGUCGAAGUAGCCGGCAC |
| siRNA 1783 | 1783 | UGCCGGCUACUUCGACUGC | 3834 | GCAGUCGAAGUAGCCGGCA |
| siRNA 1785 | 1785 | CCGGCUACUUCGACUGCAA | 3836 | UUGCAGUCGAAGUAGCCGG |
| siRNA 1786 | 1786 | CGGCUACUUCGACUGCAAG | 3837 | CUUGCAGUCGAAGUAGCCG |
| siRNA 1788 | 1788 | GCUACUUCGACUGCAAGUC | 3839 | GACUUGCAGUCGAAGUAGC |
| siRNA 1789 | 1789 | CUACUUCGACUGCAAGUCC | 3840 | GGACUUGCAGUCGAAGUAG |
| siRNA 1791 | 1791 | ACUUCGACUGCAAGUCCGA | 3842 | UCGGACUUGCAGUCGAAGU |
| siRNA 1792 | 1792 | CUUCGACUGCAAGUCCGAC | 3843 | GUCGGACUUGCAGUCGAAG |
| siRNA 1793 | 1793 | UUCGACUGCAAGUCCGACG | 3844 | CGUCGGACUUGCAGUCGAA |
| siRNA 1794 | 1794 | UCGACUGCAAGUCCGACGC | 3845 | GCGUCGGACUUGCAGUCGA |
| siRNA 1795 | 1795 | CGACUGCAAGUCCGACGCC | 3846 | GGCGUCGGACUUGCAGUCG |
| siRNA 1797 | 1797 | ACUGCAAGUCCGACGCCUG | 3848 | CAGGCGUCGGACUUGCAGU |
| siRNA 1798 | 1798 | CUGCAAGUCCGACGCCUGC | 3849 | GCAGGCGUCGGACUUGCAG |
| siRNA 1799 | 1799 | UGCAAGUCCGACGCCUGCC | 3850 | GGCAGGCGUCGGACUUGCA |
| siRNA 1840 | 1840 | GGCCUGCGAGAAGAACGGC | 3891 | GCCGUUCUUCUCGCAGGCC |
| siRNA 1843 | 1843 | CUGCGAGAAGAACGGCGUG | 3894 | CACGCCGUUCUUCUCGCAG |
| siRNA 1849 | 1849 | GAAGAACGGCGUGGCUUAC | 3900 | GUAAGCCACGCCGUUCUUC |
| siRNA 1850 | 1850 | AAGAACGGCGUGGCUUACC | 3901 | GGUAAGCCACGCCGUUCUU |
| siRNA 1851 | 1851 | AGAACGGCGUGGCUUACCU | 3902 | AGGUAAGCCACGCCGUUCU |
| siRNA 1856 | 1856 | GGCGUGGCUUACCUCUACG | 3907 | CGUAGAGGUAAGCCACGCC |
| siRNA 1857 | 1857 | GCGUGGCUUACCUCUACGG | 3908 | CCGUAGAGGUAAGCCACGC |
| siRNA 1858 | 1858 | CGUGGCUUACCUCUACGGC | 3909 | GCCGUAGAGGUAAGCCACG |
| siRNA 1859 | 1859 | GUGGCUUACCUCUACGGCA | 3910 | UGCCGUAGAGGUAAGCCAC |
| siRNA 1860 | 1860 | UGGCUUACCUCUACGGCAU | 3911 | AUGCCGUAGAGGUAAGCCA |
| siRNA 1861 | 1861 | GGCUUACCUCUACGGCAUC | 3912 | GAUGCCGUAGAGGUAAGCC |
| SiRNA 1862 | 1862 | GCUUACCUCUACGGCAUCA | 3913 | UGAUGCCGUAGAGGUAAGC |
| siRNA 1863 | 1863 | CUUACCUCUACGGCAUCAU | 3914 | AUGAUGCCGUAGAGGUAAG |
| siRNA 1864 | 1864 | UUACCUCUACGGCAUCAUC | 3915 | GAUGAUGCCGUAGAGGUAA |
| siRNA 1895 | 1895 | GGCUGCGGGCGGCUCCACA | 3946 | UGUGGAGCCGCCCGCAGCC |
| siRNA 1896 | 1896 | GCUGCGGGCGGCUCCACAA | 3947 | UUGUGGAGCCGCCCGCAGC |
| siRNA 1897 | 1897 | CUGCGGGCGGCUCCACAAG | 3948 | CUUGUGGAGCCGCCCGCAG |
| siRNA 1900 | 1900 | CGGGCGGCUCCACAAGCCG | 3951 | CGGCUUGUGGAGCCGCCCG |
| siRNA 1901 | 1901 | GGGCGGCUCCACAAGCCGG | 3952 | CCGGCUUGUGGAGCCGCCC |
| siRNA 1902 | 1902 | GGCGGCUCCACAAGCCGGG | 3953 | CCCGGCUUGUGGAGCCGCC |
| siRNA 1903 | 1903 | GCGGCUCCACAAGCCGGGG | 3954 | CCCCGGCUUGUGGAGCCGC |
| siRNA 1904 | 1904 | CGGCUCCACAAGCCGGGGG | 3955 | CCCCCGGCUUGUGGAGCCG |
| siRNA 1906 | 1906 | GCUCCACAAGCCGGGGGUC | 3957 | GACCCCCGGCUUGUGGAGC |
| siRNA 1908 | 1908 | UCCACAAGCCGGGGGUCUA | 3959 | UAGACCCCCGGCUUGUGGA |
| siRNA 1909 | 1909 | CCACAAGCCGGGGGUCUAC | 3960 | GUAGACCCCCGGCUUGUGG |
| siRNA 1910 | 1910 | CACAAGCCGGGGGUCUACA | 3961 | UGUAGACCCCCGGCUUGUG |
| siRNA 1917 | 1917 | CGGGGGUCUACACCCGCGU | 3968 | ACGCGGGUGUAGACCCCCG |
| siRNA 1927 | 1927 | CACCCGCGUGGCCAACUAU | 3978 | AUAGUUGGCCACGCGGGUG |
| SiRNA 1928 | 1928 | ACCCGCGUGGCCAACUAUG | 3979 | CAUAGUUGGCCACGCGGGU |
| SiRNA 1929 | 1929 | CCCGCGUGGCCAACUAUGU | 3980 | ACAUAGUUGGCCACGCGGG |
| SiRNA 1937 | 1937 | GCCAACUAUGUGGACUGGA | 3988 | UCCAGUCCACAUAGUUGGC |
| siRNA 1966 | 1966 | GAUACGGCCUCCCAGGCGG | 4017 | CCGCCUGGGAGGCCGUAUC |
| siRNA 1967 | 1967 | AUACGGCCUCCCAGGCGGC | 4018 | GCCGCCUGGGAGGCCGUAU |
| siRNA 1974 | 1974 | CUCCCAGGCGGCUUGUGGC | 4025 | GCCACAAGCCGCCUGGGAG |
| siRNA 1979 | 1979 | AGGCGGCUUGUGGCUCCCU | 4030 | AGGGAGCCACAAGCCGCCU |
| siRNA 1984 | 1984 | GCUUGUGGCUCCCUCCUGA | 4035 | UCAGGAGGGAGCCACAAGC |
| siRNA 1999 | 1999 | CUGACCCUCCAGCGGGACA | 4050 | UGUCCCGCUGGAGGGUCAG |
| siRNA 2001 | 2001 | GACCCUCCAGCGGGACACC | 4052 | GGUGUCCCGCUGGAGGGUC |
| siRNA 2010 | 2010 | GCGGGACACCCUGGUUCCC | 4061 | GGGAACCAGGGUGUCCCGC |
| siRNA 1999 | 1999 | CUGACCCUCCAGCGGGACA | 4050 | UGUCCCGCUGGAGGGUCAG |
| siRNA 2001 | 2001 | GACCCUCCAGCGGGACACC | 4052 | GGUGUCCCGCUGGAGGGUC |
| siRNA 2010 | 2010 | GCGGGACACCCUGGUUCCC | 4061 | GGGAACCAGGGUGUCCCGC |

[0267] The siRNAs in subset A had the following characteristics: Cross-reactivity: With 19mer in human HGFAC mRNA; Specificity category: For human: AS2 or better, SS3 or better; and miRNA seeds: AS+SS strand: seed region not conserved in human, mouse, and rat and not present in >4 species; Off-target frequency: ≤30 human off-targets matched with 2 mismatches in antisense strand; and SNPs: siRNA target sites do not harbor SNPs with a MAF≥1% (pos. 2-18).

[0268] The siRNA sequences in subset A were selected for more stringent specificity to yield subset B. Subset B includes 377 siRNAs whose base sequences are shown in Table B.

TABLE B
Subset B

| | SEQ ID | sense strand | SEQ ID | antisense strand |
|---|---|---|---|---|
| siRNA NO: | NO: | sequence (5′-3′) | NO: | sequence (5′-3′) |
| siRNA 26 | 26 | UCAGGAGCCAUGGGGCGCU | 2077 | AGCGCCCCAUGGCUCCUGA |
| siRNA 114 | 114 | UGCUGCUGCCACGGGGGUU | 2165 | AACCCCCGUGGCAGCAGCA |
| siRNA 116 | 116 | CUGCUGCCACGGGGGUUCC | 2167 | GGAACCCCCGUGGCAGCAG |
| siRNA 118 | 118 | GCUGCCACGGGGGUUCCAG | 2169 | CUGGAACCCCCGUGGCAGC |
| siRNA 122 | 122 | CCACGGGGGUUCCAGCCCC | 2173 | GGGGCUGGAACCCCCGUGG |
| siRNA 136 | 136 | GCCCCAGCCUGGCGGGAAC | 2187 | GUUCCCGCCAGGCUGGGGC |
| siRNA 137 | 137 | CCCCAGCCUGGCGGGAACC | 2188 | GGUUCCCGCCAGGCUGGGG |
| siRNA 140 | 140 | CAGCCUGGCGGGAACCGUA | 2191 | UACGGUUCCCGCCAGGCUG |
| siRNA 141 | 141 | AGCCUGGCGGGAACCGUAC | 2192 | GUACGGUUCCCGCCAGGCU |
| siRNA 143 | 143 | CCUGGCGGGAACCGUACGG | 2194 | CCGUACGGUUCCCGCCAGG |
| siRNA 144 | 144 | CUGGCGGGAACCGUACGGA | 2195 | UCCGUACGGUUCCCGCCAG |
| siRNA 145 | 145 | UGGCGGGAACCGUACGGAG | 2196 | CUCCGUACGGUUCCCGCCA |
| siRNA 146 | 146 | GGCGGGAACCGUACGGAGU | 2197 | ACUCCGUACGGUUCCCGCC |
| siRNA 149 | 149 | GGGAACCGUACGGAGUCCC | 2200 | GGGACUCCGUACGGUUCCC |
| siRNA 150 | 150 | GGAACCGUACGGAGUCCCC | 2201 | GGGGACUCCGUACGGUUCC |
| siRNA 152 | 152 | AACCGUACGGAGUCCCCAG | 2203 | CUGGGGACUCCGUACGGUU |
| siRNA 154 | 154 | CCGUACGGAGUCCCCAGAA | 2205 | UUCUGGGGACUCCGUACGG |
| siRNA 155 | 155 | CGUACGGAGUCCCCAGAAC | 2206 | GUUCUGGGGACUCCGUACG |
| siRNA 158 | 158 | ACGGAGUCCCCAGAACCUA | 2209 | UAGGUUCUGGGGACUCCGU |
| siRNA 160 | 160 | GGAGUCCCCAGAACCUAAU | 2211 | AUUAGGUUCUGGGGACUCC |
| siRNA 165 | 165 | CCCCAGAACCUAAUGCCAC | 2216 | GUGGCAUUAGGUUCUGGGG |
| siRNA 166 | 166 | CCCAGAACCUAAUGCCACA | 2217 | UGUGGCAUUAGGUUCUGGG |
| siRNA 167 | 167 | CCAGAACCUAAUGCCACAG | 2218 | CUGUGGCAUUAGGUUCUGG |
| siRNA 172 | 172 | ACCUAAUGCCACAGCGACC | 2223 | GGUCGCUGUGGCAUUAGGU |
| siRNA 173 | 173 | CCUAAUGCCACAGCGACCC | 2224 | GGGUCGCUGUGGCAUUAGG |
| siRNA 199 | 199 | CCCCACUAUCCUGGUGACC | 2250 | GGUCACCAGGAUAGUGGGG |
| siRNA 202 | 202 | CACUAUCCUGGUGACCUCU | 2253 | AGAGGUCACCAGGAUAGUG |
| siRNA 203 | 203 | ACUAUCCUGGUGACCUCUG | 2254 | CAGAGGUCACCAGGAUAGU |
| siRNA 205 | 205 | UAUCCUGGUGACCUCUGUG | 2256 | CACAGAGGUCACCAGGAUA |
| siRNA 232 | 232 | GACCCCAGCAACAAGUGCU | 2283 | AGCACUUGUUGCUGGGGUC |
| siRNA 294 | 294 | CCAGGGCAGUUCCCUCGAG | 2345 | CUCGAGGGAACUGCCCUGG |
| siRNA 295 | 295 | CAGGGCAGUUCCCUCGAGC | 2346 | GCUCGAGGGAACUGCCCUG |
| siRNA 296 | 296 | AGGGCAGUUCCCUCGAGCA | 2347 | UGCUCGAGGGAACUGCCCU |
| siRNA 301 | 301 | AGUUCCCUCGAGCAGUAGC | 2352 | GCUACUGCUCGAGGGAACU |
| siRNA 303 | 303 | UUCCCUCGAGCAGUAGCCC | 2354 | GGGCUACUGCUCGAGGGAA |
| siRNA 304 | 304 | UCCCUCGAGCAGUAGCCCC | 2355 | GGGGCUACUGCUCGAGGGA |
| siRNA 305 | 305 | CCCUCGAGCAGUAGCCCCC | 2356 | GGGGGCUACUGCUCGAGGG |
| siRNA 315 | 315 | GUAGCCCCCAGGCCCAAGC | 2366 | GCUUGGGCCUGGGGGCUAC |
| siRNA 328 | 328 | CCAAGCACUCACCGAGGAC | 2379 | GUCCUCGGUGAGUGCUUGG |
| siRNA 334 | 334 | ACUCACCGAGGACGGGAGG | 2385 | CCUCCCGUCCUCGGUGAGU |
| siRNA 335 | 335 | CUCACCGAGGACGGGAGGC | 2386 | GCCUCCCGUCCUCGGUGAG |
| siRNA 336 | 336 | UCACCGAGGACGGGAGGCC | 2387 | GGCCUCCCGUCCUCGGUGA |
| siRNA 360 | 360 | GGUUCCCCUUCCGCUACGG | 2411 | CCGUAGCGGAAGGGGAACC |
| siRNA 361 | 361 | GUUCCCCUUCCGCUACGGG | 2412 | CCCGUAGCGGAAGGGGAAC |
| siRNA 362 | 362 | UUCCCCUUCCGCUACGGGG | 2413 | CCCCGUAGCGGAAGGGGAA |
| siRNA 363 | 363 | UCCCCUUCCGCUACGGGGG | 2414 | CCCCCGUAGCGGAAGGGGA |
| siRNA 364 | 364 | CCCCUUCCGCUACGGGGGC | 2415 | GCCCCCGUAGCGGAAGGGG |
| siRNA 367 | 367 | CUUCCGCUACGGGGGCCGC | 2418 | GCGGCCCCCGUAGCGGAAG |
| siRNA 371 | 371 | CGCUACGGGGGCCGCAUGC | 2422 | GCAUGCGGCCCCCGUAGCG |
| siRNA 372 | 372 | GCUACGGGGGCCGCAUGCU | 2423 | AGCAUGCGGCCCCCGUAGC |
| siRNA 373 | 373 | CUACGGGGGCCGCAUGCUG | 2424 | CAGCAUGCGGCCCCCGUAG |
| siRNA 374 | 374 | UACGGGGGCCGCAUGCUGC | 2425 | GCAGCAUGCGGCCCCCGUA |
| siRNA 378 | 378 | GGGGCCGCAUGCUGCAUGC | 2429 | GCAUGCAGCAUGCGGCCCC |
| siRNA 389 | 389 | CUGCAUGCCUGCACUUCGG | 2440 | CCGAAGUGCAGGCAUGCAG |
| siRNA 390 | 390 | UGCAUGCCUGCACUUCGGA | 2441 | UCCGAAGUGCAGGCAUGCA |
| siRNA 391 | 391 | GCAUGCCUGCACUUCGGAG | 2442 | CUCCGAAGUGCAGGCAUGC |
| siRNA 395 | 395 | GCCUGCACUUCGGAGGGCA | 2446 | UGCCCUCCGAAGUGCAGGC |
| siRNA 398 | 398 | UGCACUUCGGAGGGCAGUG | 2449 | CACUGCCCUCCGAAGUGCA |
| siRNA 431 | 431 | UGUGCCACAACUCACAACU | 2482 | AGUUGUGAGUUGUGGCACA |
| siRNA 434 | 434 | GCCACAACUCACAACUACG | 2485 | CGUAGUUGUGAGUUGUGGC |
| siRNA 436 | 436 | CACAACUCACAACUACGAC | 2487 | GUCGUAGUUGUGAGUUGUG |
| siRNA 437 | 437 | ACAACUCACAACUACGACC | 2488 | GGUCGUAGUUGUGAGUUGU |
| siRNA 438 | 438 | CAACUCACAACUACGACCG | 2489 | CGGUCGUAGUUGUGAGUUG |
| siRNA 442 | 442 | UCACAACUACGACCGGGAC | 2493 | GUCCCGGUCGUAGUUGUGA |
| siRNA 443 | 443 | CACAACUACGACCGGGACA | 2494 | UGUCCCGGUCGUAGUUGUG |
| siRNA 445 | 445 | CAACUACGACCGGGACAGG | 2496 | CCUGUCCCGGUCGUAGUUG |
| siRNA 446 | 446 | AACUACGACCGGGACAGGG | 2497 | CCCUGUCCCGGUCGUAGUU |
| siRNA 469 | 469 | GGGCUACUGUGUGGAGGCC | 2520 | GGCCUCCACACAGUAGCCC |
| siRNA 472 | 472 | CUACUGUGUGGAGGCCACC | 2523 | GGUGGCCUCCACACAGUAG |
| siRNA 473 | 473 | UACUGUGUGGAGGCCACCC | 2524 | GGGUGGCCUCCACACAGUA |
| siRNA 530 | 530 | UCCGGCCCCUGCCUCAAUG | 2581 | CAUUGAGGCAGGGGCCGGA |
| siRNA 531 | 531 | CCGGCCCCUGCCUCAAUGG | 2582 | CCAUUGAGGCAGGGGCCGG |
| siRNA 549 | 549 | GAGGCUCCUGCUCCAAUAC | 2600 | GUAUUGGAGCAGGAGCCUC |
| siRNA 558 | 558 | GCUCCAAUACCCAGGACCC | 2609 | GGGUCCUGGGUAUUGGAGC |
| siRNA 562 | 562 | CAAUACCCAGGACCCCCAG | 2613 | CUGGGGGUCCUGGGUAUUG |
| siRNA 564 | 564 | AUACCCAGGACCCCCAGUC | 2615 | GACUGGGGGUCCUGGGUAU |
| siRNA 569 | 569 | CAGGACCCCCAGUCCUAUC | 2620 | GAUAGGACUGGGGGUCCUG |
| siRNA 575 | 575 | CCCCAGUCCUAUCACUGCA | 2626 | UGCAGUGAUAGGACUGGGG |
| siRNA 601 | 601 | CCGGGCCUUCACCGGCAAG | 2652 | CUUGCCGGUGAAGGCCCGG |
| siRNA 602 | 602 | CGGGCCUUCACCGGCAAGG | 2653 | CCUUGCCGGUGAAGGCCCG |
| siRNA 603 | 603 | GGGCCUUCACCGGCAAGGA | 2654 | UCCUUGCCGGUGAAGGCCC |
| siRNA 604 | 604 | GGCCUUCACCGGCAAGGAC | 2655 | GUCCUUGCCGGUGAAGGCC |
| siRNA 610 | 610 | CACCGGCAAGGACUGCGGC | 2661 | GCCGCAGUCCUUGCCGGUG |
| siRNA 612 | 612 | CCGGCAAGGACUGCGGCAC | 2663 | GUGCCGCAGUCCUUGCCGG |
| siRNA 616 | 616 | CAAGGACUGCGGCACAGAG | 2667 | CUCUGUGCCGCAGUCCUUG |
| siRNA 624 | 624 | GCGGCACAGAGAAAUGCUU | 2675 | AAGCAUUUCUCUGUGCCGC |
| siRNA 628 | 628 | CACAGAGAAAUGCUUUGAU | 2679 | AUCAAAGCAUUUCUCUGUG |
| siRNA 729 | 729 | GGGGCCGGACCUGGUGCGA | 2780 | UCGCACCAGGUCCGGCCCC |
| siRNA 730 | 730 | GGGCCGGACCUGGUGCGAA | 2781 | UUCGCACCAGGUCCGGCCC |
| siRNA 732 | 732 | GCCGGACCUGGUGCGAAGG | 2783 | CCUUCGCACCAGGUCCGGC |
| siRNA 733 | 733 | CCGGACCUGGUGCGAAGGC | 2784 | GCCUUCGCACCAGGUCCGG |
| siRNA 735 | 735 | GGACCUGGUGCGAAGGCAC | 2786 | GUGCCUUCGCACCAGGUCC |
| siRNA 736 | 736 | GACCUGGUGCGAAGGCACC | 2787 | GGUGCCUUCGCACCAGGUC |
| siRNA 737 | 737 | ACCUGGUGCGAAGGCACCC | 2788 | GGGUGCCUUCGCACCAGGU |
| siRNA 738 | 738 | CCUGGUGCGAAGGCACCCG | 2789 | CGGGUGCCUUCGCACCAGG |
| siRNA 742 | 742 | GUGCGAAGGCACCCGACAU | 2793 | AUGUCGGGUGCCUUCGCAC |
| siRNA 743 | 743 | UGCGAAGGCACCCGACAUA | 2794 | UAUGUCGGGUGCCUUCGCA |
| siRNA 744 | 744 | GCGAAGGCACCCGACAUAC | 2795 | GUAUGUCGGGUGCCUUCGC |
| siRNA 745 | 745 | CGAAGGCACCCGACAUACA | 2796 | UGUAUGUCGGGUGCCUUCG |
| siRNA 747 | 747 | AAGGCACCCGACAUACAGC | 2798 | GCUGUAUGUCGGGUGCCUU |
| siRNA 748 | 748 | AGGCACCCGACAUACAGCU | 2799 | AGCUGUAUGUCGGGUGCCU |
| siRNA 749 | 749 | GGCACCCGACAUACAGCUU | 2800 | AAGCUGUAUGUCGGGUGCC |
| siRNA 751 | 751 | CACCCGACAUACAGCUUGU | 2802 | ACAAGCUGUAUGUCGGGUG |
| siRNA 753 | 753 | CCCGACAUACAGCUUGUCU | 2804 | AGACAAGCUGUAUGUCGGG |
| siRNA 754 | 754 | CCGACAUACAGCUUGUCUG | 2805 | CAGACAAGCUGUAUGUCGG |
| siRNA 755 | 755 | CGACAUACAGCUUGUCUGA | 2806 | UCAGACAAGCUGUAUGUCG |
| siRNA 756 | 756 | GACAUACAGCUUGUCUGAG | 2807 | CUCAGACAAGCUGUAUGUC |
| siRNA 757 | 757 | ACAUACAGCUUGUCUGAGC | 2808 | GCUCAGACAAGCUGUAUGU |
| siRNA 758 | 758 | CAUACAGCUUGUCUGAGCA | 2809 | UGCUCAGACAAGCUGUAUG |
| siRNA 776 | 776 | AGCCCUUGCCUGAACGGGG | 2827 | CCCCGUUCAGGCAAGGGCU |
| siRNA 796 | 796 | CACCUGCCACCUGAUCGUG | 2847 | CACGAUCAGGUGGCAGGUG |
| siRNA 799 | 799 | CUGCCACCUGAUCGUGGCC | 2850 | GGCCACGAUCAGGUGGCAG |
| siRNA 810 | 810 | UCGUGGCCACCGGGACCAC | 2861 | GUGGUCCCGGUGGCCACGA |
| siRNA 819 | 819 | CCGGGACCACCGUGUGUGC | 2870 | GCACACACGGUGGUCCCGG |
| siRNA 848 | 848 | GGCUUCGCUGGACGGCUCU | 2899 | AGAGCCGUCCAGCGAAGCC |
| siRNA 853 | 853 | CGCUGGACGGCUCUGCAAC | 2904 | GUUGCAGAGCCGUCCAGCG |
| siRNA 855 | 855 | CUGGACGGCUCUGCAACAU | 2906 | AUGUUGCAGAGCCGUCCAG |
| siRNA 857 | 857 | GGACGGCUCUGCAACAUCG | 2908 | CGAUGUUGCAGAGCCGUCC |
| siRNA 858 | 858 | GACGGCUCUGCAACAUCGA | 2909 | UCGAUGUUGCAGAGCCGUC |
| siRNA 859 | 859 | ACGGCUCUGCAACAUCGAG | 2910 | CUCGAUGUUGCAGAGCCGU |
| siRNA 861 | 861 | GGCUCUGCAACAUCGAGCC | 2912 | GGCUCGAUGUUGCAGAGCC |
| siRNA 862 | 862 | GCUCUGCAACAUCGAGCCU | 2913 | AGGCUCGAUGUUGCAGAGC |
| siRNA 863 | 863 | CUCUGCAACAUCGAGCCUG | 2914 | CAGGCUCGAUGUUGCAGAG |
| siRNA 871 | 871 | CAUCGAGCCUGAUGAGCGC | 2922 | GCGCUCAUCAGGCUCGAUG |
| siRNA 872 | 872 | AUCGAGCCUGAUGAGCGCU | 2923 | AGCGCUCAUCAGGCUCGAU |
| siRNA 873 | 873 | UCGAGCCUGAUGAGCGCUG | 2924 | CAGCGCUCAUCAGGCUCGA |
| siRNA 875 | 875 | GAGCCUGAUGAGCGCUGCU | 2926 | AGCAGCGCUCAUCAGGCUC |
| siRNA 879 | 879 | CUGAUGAGCGCUGCUUCUU | 2930 | AAGAAGCAGCGCUCAUCAG |
| siRNA 896 | 896 | UUGGGGAACGGCACUGGGU | 2947 | ACCCAGUGCCGUUCCCCAA |
| siRNA 901 | 901 | GAACGGCACUGGGUACCGU | 2952 | ACGGUACCCAGUGCCGUUC |
| siRNA 902 | 902 | AACGGCACUGGGUACCGUG | 2953 | CACGGUACCCAGUGCCGUU |
| siRNA 908 | 908 | ACUGGGUACCGUGGCGUGG | 2959 | CCACGCCACGGUACCCAGU |
| siRNA 909 | 909 | CUGGGUACCGUGGCGUGGC | 2960 | GCCACGCCACGGUACCCAG |
| siRNA 910 | 910 | UGGGUACCGUGGCGUGGCC | 2961 | GGCCACGCCACGGUACCCA |
| siRNA 911 | 911 | GGGUACCGUGGCGUGGCCA | 2962 | UGGCCACGCCACGGUACCC |
| siRNA 912 | 912 | GGUACCGUGGCGUGGCCAG | 2963 | CUGGCCACGCCACGGUACC |
| siRNA 913 | 913 | GUACCGUGGCGUGGCCAGC | 2964 | GCUGGCCACGCCACGGUAC |
| siRNA 916 | 916 | CCGUGGCGUGGCCAGCACC | 2967 | GGUGCUGGCCACGCCACGG |
| siRNA 957 | 957 | UGGCCUGGAACUCCGAUCU | 3008 | AGAUCGGAGUUCCAGGCCA |
| siRNA 959 | 959 | GCCUGGAACUCCGAUCUGC | 3010 | GCAGAUCGGAGUUCCAGGC |
| siRNA 960 | 960 | CCUGGAACUCCGAUCUGCU | 3011 | AGCAGAUCGGAGUUCCAGG |
| siRNA 961 | 961 | CUGGAACUCCGAUCUGCUC | 3012 | GAGCAGAUCGGAGUUCCAG |
| siRNA 962 | 962 | UGGAACUCCGAUCUGCUCU | 3013 | AGAGCAGAUCGGAGUUCCA |
| siRNA 964 | 964 | GAACUCCGAUCUGCUCUAC | 3015 | GUAGAGCAGAUCGGAGUUC |
| siRNA 965 | 965 | AACUCCGAUCUGCUCUACC | 3016 | GGUAGAGCAGAUCGGAGUU |
| siRNA 992 | 992 | CACGUGGACUCCGUGGGCG | 3043 | CGCCCACGGAGUCCACGUG |
| siRNA 996 | 996 | UGGACUCCGUGGGCGCCGC | 3047 | GCGGCGCCCACGGAGUCCA |
| siRNA 998 | 998 | GACUCCGUGGGCGCCGCGG | 3049 | CCGCGGCGCCCACGGAGUC |
| siRNA 1027 | 1027 | CCUGGGCCCCCAUGCCUAC | 3078 | GUAGGCAUGGGGGCCCAGG |
| siRNA 1028 | 1028 | CUGGGCCCCCAUGCCUACU | 3079 | AGUAGGCAUGGGGGCCCAG |
| siRNA 1033 | 1033 | CCCCCAUGCCUACUGCCGG | 3084 | CCGGCAGUAGGCAUGGGGG |
| siRNA 1034 | 1034 | CCCCAUGCCUACUGCCGGA | 3085 | UCCGGCAGUAGGCAUGGGG |
| siRNA 1035 | 1035 | CCCAUGCCUACUGCCGGAA | 3086 | UUCCGGCAGUAGGCAUGGG |
| siRNA 1039 | 1039 | UGCCUACUGCCGGAAUCCG | 3090 | CGGAUUCCGGCAGUAGGCA |
| siRNA 1040 | 1040 | GCCUACUGCCGGAAUCCGG | 3091 | CCGGAUUCCGGCAGUAGGC |
| siRNA 1041 | 1041 | CCUACUGCCGGAAUCCGGA | 3092 | UCCGGAUUCCGGCAGUAGG |
| siRNA 1042 | 1042 | CUACUGCCGGAAUCCGGAC | 3093 | GUCCGGAUUCCGGCAGUAG |
| siRNA 1043 | 1043 | UACUGCCGGAAUCCGGACA | 3094 | UGUCCGGAUUCCGGCAGUA |
| siRNA 1047 | 1047 | GCCGGAAUCCGGACAAUGA | 3098 | UCAUUGUCCGGAUUCCGGC |
| siRNA 1048 | 1048 | CCGGAAUCCGGACAAUGAC | 3099 | GUCAUUGUCCGGAUUCCGG |
| siRNA 1050 | 1050 | GGAAUCCGGACAAUGACGA | 3101 | UCGUCAUUGUCCGGAUUCC |
| siRNA 1051 | 1051 | GAAUCCGGACAAUGACGAG | 3102 | CUCGUCAUUGUCCGGAUUC |
| siRNA 1052 | 1052 | AAUCCGGACAAUGACGAGA | 3103 | UCUCGUCAUUGUCCGGAUU |
| siRNA 1053 | 1053 | AUCCGGACAAUGACGAGAG | 3104 | CUCUCGUCAUUGUCCGGAU |
| siRNA 1054 | 1054 | UCCGGACAAUGACGAGAGG | 3105 | CCUCUCGUCAUUGUCCGGA |
| siRNA 1055 | 1055 | CCGGACAAUGACGAGAGGC | 3106 | GCCUCUCGUCAUUGUCCGG |
| siRNA 1067 | 1067 | GAGAGGCCCUGGUGCUACG | 3118 | CGUAGCACCAGGGCCUCUC |
| siRNA 1100 | 1100 | GCGCUCUCCUGGGAGUACU | 3151 | AGUACUCCCAGGAGAGCGC |
| siRNA 1106 | 1106 | UCCUGGGAGUACUGCCGCC | 3157 | GGCGGCAGUACUCCCAGGA |
| siRNA 1121 | 1121 | CGCCUGGAGGCCUGCGAAU | 3172 | AUUCGCAGGCCUCCAGGCG |
| siRNA 1122 | 1122 | GCCUGGAGGCCUGCGAAUC | 3173 | GAUUCGCAGGCCUCCAGGC |
| siRNA 1123 | 1123 | CCUGGAGGCCUGCGAAUCC | 3174 | GGAUUCGCAGGCCUCCAGG |
| siRNA 1131 | 1131 | CCUGCGAAUCCCUCACCAG | 3182 | CUGGUGAGGGAUUCGCAGG |
| siRNA 1133 | 1133 | UGCGAAUCCCUCACCAGAG | 3184 | CUCUGGUGAGGGAUUCGCA |
| siRNA 1136 | 1136 | GAAUCCCUCACCAGAGUCC | 3187 | GGACUCUGGUGAGGGAUUC |
| siRNA 1141 | 1141 | CCUCACCAGAGUCCAACUG | 3192 | CAGUUGGACUCUGGUGAGG |
| siRNA 1143 | 1143 | UCACCAGAGUCCAACUGUC | 3194 | GACAGUUGGACUCUGGUGA |
| siRNA 1144 | 1144 | CACCAGAGUCCAACUGUCA | 3195 | UGACAGUUGGACUCUGGUG |
| siRNA 1149 | 1149 | GAGUCCAACUGUCACCGGA | 3200 | UCCGGUGACAGUUGGACUC |
| siRNA 1151 | 1151 | GUCCAACUGUCACCGGAUC | 3202 | GAUCCGGUGACAGUUGGAC |
| siRNA 1152 | 1152 | UCCAACUGUCACCGGAUCU | 3203 | AGAUCCGGUGACAGUUGGA |
| siRNA 1153 | 1153 | CCAACUGUCACCGGAUCUC | 3204 | GAGAUCCGGUGACAGUUGG |
| siRNA 1161 | 1161 | CACCGGAUCUCCUGGCGAC | 3212 | GUCGCCAGGAGAUCCGGUG |
| siRNA 1166 | 1166 | GAUCUCCUGGCGACCCUGC | 3217 | GCAGGGUCGCCAGGAGAUC |
| siRNA 1203 | 1203 | GGCGCCAGGCCUGCGGCAG | 3254 | CUGCCGCAGGCCUGGCGCC |
| siRNA 1215 | 1215 | GCGGCAGGAGGCACAAGAA | 3266 | UUCUUGUGCCUCCUGCCGC |
| siRNA 1224 | 1224 | GGCACAAGAAGAGGACGUU | 3275 | AACGUCCUCUUCUUGUGCC |
| siRNA 1225 | 1225 | GCACAAGAAGAGGACGUUC | 3276 | GAACGUCCUCUUCUUGUGC |
| siRNA 1226 | 1226 | CACAAGAAGAGGACGUUCC | 3277 | GGAACGUCCUCUUCUUGUG |
| siRNA 1235 | 1235 | AGGACGUUCCUGCGGCCAC | 3286 | GUGGCCGCAGGAACGUCCU |
| siRNA 1236 | 1236 | GGACGUUCCUGCGGCCACG | 3287 | CGUGGCCGCAGGAACGUCC |
| siRNA 1238 | 1238 | ACGUUCCUGCGGCCACGUA | 3289 | UACGUGGCCGCAGGAACGU |
| siRNA 1240 | 1240 | GUUCCUGCGGCCACGUAUC | 3291 | GAUACGUGGCCGCAGGAAC |
| siRNA 1242 | 1242 | UCCUGCGGCCACGUAUCAU | 3293 | AUGAUACGUGGCCGCAGGA |
| siRNA 1243 | 1243 | CCUGCGGCCACGUAUCAUC | 3294 | GAUGAUACGUGGCCGCAGG |
| siRNA 1244 | 1244 | CUGCGGCCACGUAUCAUCG | 3295 | CGAUGAUACGUGGCCGCAG |
| siRNA 1246 | 1246 | GCGGCCACGUAUCAUCGGC | 3297 | GCCGAUGAUACGUGGCCGC |
| siRNA 1247 | 1247 | CGGCCACGUAUCAUCGGCG | 3298 | CGCCGAUGAUACGUGGCCG |
| siRNA 1248 | 1248 | GGCCACGUAUCAUCGGCGG | 3299 | CCGCCGAUGAUACGUGGCC |
| siRNA 1249 | 1249 | GCCACGUAUCAUCGGCGGC | 3300 | GCCGCCGAUGAUACGUGGC |
| siRNA 1250 | 1250 | CCACGUAUCAUCGGCGGCU | 3301 | AGCCGCCGAUGAUACGUGG |
| siRNA 1251 | 1251 | CACGUAUCAUCGGCGGCUC | 3302 | GAGCCGCCGAUGAUACGUG |
| siRNA 1274 | 1274 | UCGCUGCCCGGCUCGCACC | 3325 | GGUGCGAGCCGGGCAGCGA |
| siRNA 1299 | 1299 | UGGCCGCCAUCUACAUCGG | 3350 | CCGAUGUAGAUGGCGGCCA |
| siRNA 1303 | 1303 | CGCCAUCUACAUCGGGGAC | 3354 | GUCCCCGAUGUAGAUGGCG |
| siRNA 1307 | 1307 | AUCUACAUCGGGGACAGCU | 3358 | AGCUGUCCCCGAUGUAGAU |
| siRNA 1309 | 1309 | CUACAUCGGGGACAGCUUC | 3360 | GAAGCUGUCCCCGAUGUAG |
| siRNA 1310 | 1310 | UACAUCGGGGACAGCUUCU | 3361 | AGAAGCUGUCCCCGAUGUA |
| siRNA 1312 | 1312 | CAUCGGGGACAGCUUCUGC | 3363 | GCAGAAGCUGUCCCCGAUG |
| siRNA 1314 | 1314 | UCGGGGACAGCUUCUGCGC | 3365 | GCGCAGAAGCUGUCCCCGA |
| siRNA 1315 | 1315 | CGGGGACAGCUUCUGCGCC | 3366 | GGCGCAGAAGCUGUCCCCG |
| siRNA 1318 | 1318 | GGACAGCUUCUGCGCCGGG | 3369 | CCCGGCGCAGAAGCUGUCC |
| siRNA 1319 | 1319 | GACAGCUUCUGCGCCGGGA | 3370 | UCCCGGCGCAGAAGCUGUC |
| siRNA 1352 | 1352 | UGCUGGGUGGUGUCGGCCG | 3403 | CGGCCGACACCACCCAGCA |
| siRNA 1353 | 1353 | GCUGGGUGGUGUCGGCCGC | 3404 | GCGGCCGACACCACCCAGC |
| siRNA 1379 | 1379 | UUCUCCCACAGCCCCCCCA | 3430 | UGGGGGGGCUGUGGGAGAA |
| siRNA 1389 | 1389 | GCCCCCCCAGGGACAGCGU | 3440 | ACGCUGUCCCUGGGGGGGC |
| siRNA 1390 | 1390 | CCCCCCCAGGGACAGCGUC | 3441 | GACGCUGUCCCUGGGGGGG |
| siRNA 1392 | 1392 | CCCCCAGGGACAGCGUCUC | 3443 | GAGACGCUGUCCCUGGGGG |
| siRNA 1424 | 1424 | CAGCACUUCUUCAACCGCA | 3475 | UGCGGUUGAAGAAGUGCUG |
| siRNA 1427 | 1427 | CACUUCUUCAACCGCACGA | 3478 | UCGUGCGGUUGAAGAAGUG |
| siRNA 1428 | 1428 | ACUUCUUCAACCGCACGAC | 3479 | GUCGUGCGGUUGAAGAAGU |
| siRNA 1429 | 1429 | CUUCUUCAACCGCACGACG | 3480 | CGUCGUGCGGUUGAAGAAG |
| siRNA 1430 | 1430 | UUCUUCAACCGCACGACGG | 3481 | CCGUCGUGCGGUUGAAGAA |
| siRNA 1431 | 1431 | UCUUCAACCGCACGACGGA | 3482 | UCCGUCGUGCGGUUGAAGA |
| siRNA 1432 | 1432 | CUUCAACCGCACGACGGAC | 3483 | GUCCGUCGUGCGGUUGAAG |
| siRNA 1433 | 1433 | UUCAACCGCACGACGGACG | 3484 | CGUCCGUCGUGCGGUUGAA |
| siRNA 1434 | 1434 | UCAACCGCACGACGGACGU | 3485 | ACGUCCGUCGUGCGGUUGA |
| siRNA 1435 | 1435 | CAACCGCACGACGGACGUG | 3486 | CACGUCCGUCGUGCGGUUG |
| siRNA 1436 | 1436 | AACCGCACGACGGACGUGA | 3487 | UCACGUCCGUCGUGCGGUU |
| siRNA 1438 | 1438 | CCGCACGACGGACGUGACG | 3489 | CGUCACGUCCGUCGUGCGG |
| siRNA 1439 | 1439 | CGCACGACGGACGUGACGC | 3490 | GCGUCACGUCCGUCGUGCG |
| siRNA 1440 | 1440 | GCACGACGGACGUGACGCA | 3491 | UGCGUCACGUCCGUCGUGC |
| siRNA 1441 | 1441 | CACGACGGACGUGACGCAG | 3492 | CUGCGUCACGUCCGUCGUG |
| siRNA 1442 | 1442 | ACGACGGACGUGACGCAGA | 3493 | UCUGCGUCACGUCCGUCGU |
| siRNA 1443 | 1443 | CGACGGACGUGACGCAGAC | 3494 | GUCUGCGUCACGUCCGUCG |
| siRNA 1445 | 1445 | ACGGACGUGACGCAGACCU | 3496 | AGGUCUGCGUCACGUCCGU |
| siRNA 1446 | 1446 | CGGACGUGACGCAGACCUU | 3497 | AAGGUCUGCGUCACGUCCG |
| siRNA 1447 | 1447 | GGACGUGACGCAGACCUUC | 3498 | GAAGGUCUGCGUCACGUCC |
| siRNA 1449 | 1449 | ACGUGACGCAGACCUUCGG | 3500 | CCGAAGGUCUGCGUCACGU |
| siRNA 1452 | 1452 | UGACGCAGACCUUCGGCAU | 3503 | AUGCCGAAGGUCUGCGUCA |
| siRNA 1453 | 1453 | GACGCAGACCUUCGGCAUC | 3504 | GAUGCCGAAGGUCUGCGUC |
| siRNA 1455 | 1455 | CGCAGACCUUCGGCAUCGA | 3506 | UCGAUGCCGAAGGUCUGCG |
| siRNA 1456 | 1456 | GCAGACCUUCGGCAUCGAG | 3507 | CUCGAUGCCGAAGGUCUGC |
| siRNA 1459 | 1459 | GACCUUCGGCAUCGAGAAG | 3510 | CUUCUCGAUGCCGAAGGUC |
| siRNA 1460 | 1460 | ACCUUCGGCAUCGAGAAGU | 3511 | ACUUCUCGAUGCCGAAGGU |
| siRNA 1463 | 1463 | UUCGGCAUCGAGAAGUACA | 3514 | UGUACUUCUCGAUGCCGAA |
| siRNA 1464 | 1464 | UCGGCAUCGAGAAGUACAU | 3515 | AUGUACUUCUCGAUGCCGA |
| siRNA 1469 | 1469 | AUCGAGAAGUACAUCCCGU | 3520 | ACGGGAUGUACUUCUCGAU |
| siRNA 1470 | 1470 | UCGAGAAGUACAUCCCGUA | 3521 | UACGGGAUGUACUUCUCGA |
| siRNA 1471 | 1471 | CGAGAAGUACAUCCCGUAC | 3522 | GUACGGGAUGUACUUCUCG |
| siRNA 1474 | 1474 | GAAGUACAUCCCGUACACC | 3525 | GGUGUACGGGAUGUACUUC |
| siRNA 1475 | 1475 | AAGUACAUCCCGUACACCC | 3526 | GGGUGUACGGGAUGUACUU |
| siRNA 1476 | 1476 | AGUACAUCCCGUACACCCU | 3527 | AGGGUGUACGGGAUGUACU |
| siRNA 1477 | 1477 | GUACAUCCCGUACACCCUG | 3528 | CAGGGUGUACGGGAUGUAC |
| siRNA 1478 | 1478 | UACAUCCCGUACACCCUGU | 3529 | ACAGGGUGUACGGGAUGUA |
| siRNA 1504 | 1504 | GUUCAACCCCAGCGACCAC | 3555 | GUGGUCGCUGGGGUUGAAC |
| siRNA 1506 | 1506 | UCAACCCCAGCGACCACGA | 3557 | UCGUGGUCGCUGGGGUUGA |
| siRNA 1507 | 1507 | CAACCCCAGCGACCACGAC | 3558 | GUCGUGGUCGCUGGGGUUG |
| siRNA 1509 | 1509 | ACCCCAGCGACCACGACCU | 3560 | AGGUCGUGGUCGCUGGGGU |
| siRNA 1512 | 1512 | CCAGCGACCACGACCUCGU | 3563 | ACGAGGUCGUGGUCGCUGG |
| siRNA 1513 | 1513 | CAGCGACCACGACCUCGUC | 3564 | GACGAGGUCGUGGUCGCUG |
| siRNA 1516 | 1516 | CGACCACGACCUCGUCCUG | 3567 | CAGGACGAGGUCGUGGUCG |
| siRNA 1518 | 1518 | ACCACGACCUCGUCCUGAU | 3569 | AUCAGGACGAGGUCGUGGU |
| siRNA 1519 | 1519 | CCACGACCUCGUCCUGAUC | 3570 | GAUCAGGACGAGGUCGUGG |
| siRNA 1521 | 1521 | ACGACCUCGUCCUGAUCCG | 3572 | CGGAUCAGGACGAGGUCGU |
| siRNA 1523 | 1523 | GACCUCGUCCUGAUCCGGC | 3574 | GCCGGAUCAGGACGAGGUC |
| siRNA 1524 | 1524 | ACCUCGUCCUGAUCCGGCU | 3575 | AGCCGGAUCAGGACGAGGU |
| siRNA 1528 | 1528 | CGUCCUGAUCCGGCUGAAG | 3579 | CUUCAGCCGGAUCAGGACG |
| siRNA 1562 | 1562 | UGUGCCACACGCUCGCAGU | 3613 | ACUGCGAGCGUGUGGCACA |
| siRNA 1563 | 1563 | GUGCCACACGCUCGCAGUU | 3614 | AACUGCGAGCGUGUGGCAC |
| siRNA 1564 | 1564 | UGCCACACGCUCGCAGUUC | 3615 | GAACUGCGAGCGUGUGGCA |
| siRNA 1565 | 1565 | GCCACACGCUCGCAGUUCG | 3616 | CGAACUGCGAGCGUGUGGC |
| siRNA 1566 | 1566 | CCACACGCUCGCAGUUCGU | 3617 | ACGAACUGCGAGCGUGUGG |
| siRNA 1567 | 1567 | CACACGCUCGCAGUUCGUG | 3618 | CACGAACUGCGAGCGUGUG |
| siRNA 1568 | 1568 | ACACGCUCGCAGUUCGUGC | 3619 | GCACGAACUGCGAGCGUGU |
| siRNA 1572 | 1572 | GCUCGCAGUUCGUGCAGCC | 3623 | GGCUGCACGAACUGCGAGC |
| siRNA 1574 | 1574 | UCGCAGUUCGUGCAGCCCA | 3625 | UGGGCUGCACGAACUGCGA |
| siRNA 1615 | 1615 | CACCUUCCCCGCAGGACAC | 3666 | GUGUCCUGCGGGGAAGGUG |
| siRNA 1616 | 1616 | ACCUUCCCCGCAGGACACA | 3667 | UGUGUCCUGCGGGGAAGGU |
| siRNA 1617 | 1617 | CCUUCCCCGCAGGACACAA | 3668 | UUGUGUCCUGCGGGGAAGG |
| siRNA 1619 | 1619 | UUCCCCGCAGGACACAAGU | 3670 | ACUUGUGUCCUGCGGGGAA |
| siRNA 1621 | 1621 | CCCCGCAGGACACAAGUGC | 3672 | GCACUUGUGUCCUGCGGGG |
| siRNA 1622 | 1622 | CCCGCAGGACACAAGUGCC | 3673 | GGCACUUGUGUCCUGCGGG |
| siRNA 1623 | 1623 | CCGCAGGACACAAGUGCCA | 3674 | UGGCACUUGUGUCCUGCGG |
| siRNA 1624 | 1624 | CGCAGGACACAAGUGCCAG | 3675 | CUGGCACUUGUGUCCUGCG |
| siRNA 1628 | 1628 | GGACACAAGUGCCAGAUUG | 3679 | CAAUCUGGCACUUGUGUCC |
| siRNA 1630 | 1630 | ACACAAGUGCCAGAUUGCG | 3681 | CGCAAUCUGGCACUUGUGU |
| siRNA 1631 | 1631 | CACAAGUGCCAGAUUGCGG | 3682 | CCGCAAUCUGGCACUUGUG |
| siRNA 1635 | 1635 | AGUGCCAGAUUGCGGGCUG | 3686 | CAGCCCGCAAUCUGGCACU |
| siRNA 1636 | 1636 | GUGCCAGAUUGCGGGCUGG | 3687 | CCAGCCCGCAAUCUGGCAC |
| siRNA 1637 | 1637 | UGCCAGAUUGCGGGCUGGG | 3688 | CCCAGCCCGCAAUCUGGCA |
| siRNA 1643 | 1643 | AUUGCGGGCUGGGGCCACU | 3694 | AGUGGCCCCAGCCCGCAAU |
| siRNA 1651 | 1651 | CUGGGGCCACUUGGAUGAG | 3702 | CUCAUCCAAGUGGCCCCAG |
| siRNA 1662 | 1662 | UGGAUGAGAACGUGAGCGG | 3713 | CCGCUCACGUUCUCAUCCA |
| siRNA 1663 | 1663 | GGAUGAGAACGUGAGCGGC | 3714 | GCCGCUCACGUUCUCAUCC |
| siRNA 1664 | 1664 | GAUGAGAACGUGAGCGGCU | 3715 | AGCCGCUCACGUUCUCAUC |
| siRNA 1672 | 1672 | CGUGAGCGGCUACUCCAGC | 3723 | GCUGGAGUAGCCGCUCACG |
| siRNA 1707 | 1707 | UGGUCCCCCUGGUCGCCGA | 3758 | UCGGCGACCAGGGGGACCA |
| siRNA 1708 | 1708 | GGUCCCCCUGGUCGCCGAC | 3759 | GUCGGCGACCAGGGGGACC |
| siRNA 1709 | 1709 | GUCCCCCUGGUCGCCGACC | 3760 | GGUCGGCGACCAGGGGGAC |
| siRNA 1712 | 1712 | CCCCUGGUCGCCGACCACA | 3763 | UGUGGUCGGCGACCAGGGG |
| siRNA 1713 | 1713 | CCCUGGUCGCCGACCACAA | 3764 | UUGUGGUCGGCGACCAGGG |
| siRNA 1715 | 1715 | CUGGUCGCCGACCACAAGU | 3766 | ACUUGUGGUCGGCGACCAG |
| siRNA 1716 | 1716 | UGGUCGCCGACCACAAGUG | 3767 | CACUUGUGGUCGGCGACCA |
| siRNA 1717 | 1717 | GGUCGCCGACCACAAGUGC | 3768 | GCACUUGUGGUCGGCGACC |
| siRNA 1718 | 1718 | GUCGCCGACCACAAGUGCA | 3769 | UGCACUUGUGGUCGGCGAC |
| siRNA 1722 | 1722 | CCGACCACAAGUGCAGCAG | 3773 | CUGCUGCACUUGUGGUCGG |
| siRNA 1737 | 1737 | GCAGCCCUGAGGUCUACGG | 3788 | CCGUAGACCUCAGGGCUGC |
| siRNA 1739 | 1739 | AGCCCUGAGGUCUACGGCG | 3790 | CGCCGUAGACCUCAGGGCU |
| siRNA 1741 | 1741 | CCCUGAGGUCUACGGCGCC | 3792 | GGCGCCGUAGACCUCAGGG |
| siRNA 1743 | 1743 | CUGAGGUCUACGGCGCCGA | 3794 | UCGGCGCCGUAGACCUCAG |
| siRNA 1745 | 1745 | GAGGUCUACGGCGCCGACA | 3796 | UGUCGGCGCCGUAGACCUC |
| siRNA 1749 | 1749 | UCUACGGCGCCGACAUCAG | 3800 | CUGAUGUCGGCGCCGUAGA |
| siRNA 1751 | 1751 | UACGGCGCCGACAUCAGCC | 3802 | GGCUGAUGUCGGCGCCGUA |
| siRNA 1752 | 1752 | ACGGCGCCGACAUCAGCCC | 3803 | GGGCUGAUGUCGGCGCCGU |
| siRNA 1753 | 1753 | CGGCGCCGACAUCAGCCCC | 3804 | GGGGCUGAUGUCGGCGCCG |
| siRNA 1759 | 1759 | CGACAUCAGCCCCAACAUG | 3810 | CAUGUUGGGGCUGAUGUCG |
| siRNA 1766 | 1766 | AGCCCCAACAUGCUCUGUG | 3817 | CACAGAGCAUGUUGGGGCU |
| siRNA 1770 | 1770 | CCAACAUGCUCUGUGCCGG | 3821 | CCGGCACAGAGCAUGUUGG |
| siRNA 1780 | 1780 | CUGUGCCGGCUACUUCGAC | 3831 | GUCGAAGUAGCCGGCACAG |
| siRNA 1781 | 1781 | UGUGCCGGCUACUUCGACU | 3832 | AGUCGAAGUAGCCGGCACA |
| siRNA 1782 | 1782 | GUGCCGGCUACUUCGACUG | 3833 | CAGUCGAAGUAGCCGGCAC |
| siRNA 1783 | 1783 | UGCCGGCUACUUCGACUGC | 3834 | GCAGUCGAAGUAGCCGGCA |
| siRNA 1785 | 1785 | CCGGCUACUUCGACUGCAA | 3836 | UUGCAGUCGAAGUAGCCGG |
| siRNA 1786 | 1786 | CGGCUACUUCGACUGCAAG | 3837 | CUUGCAGUCGAAGUAGCCG |
| siRNA 1788 | 1788 | GCUACUUCGACUGCAAGUC | 3839 | GACUUGCAGUCGAAGUAGC |
| siRNA 1789 | 1789 | CUACUUCGACUGCAAGUCC | 3840 | GGACUUGCAGUCGAAGUAG |
| siRNA 1791 | 1791 | ACUUCGACUGCAAGUCCGA | 3842 | UCGGACUUGCAGUCGAAGU |
| siRNA 1792 | 1792 | CUUCGACUGCAAGUCCGAC | 3843 | GUCGGACUUGCAGUCGAAG |
| siRNA 1793 | 1793 | UUCGACUGCAAGUCCGACG | 3844 | CGUCGGACUUGCAGUCGAA |
| siRNA 1794 | 1794 | UCGACUGCAAGUCCGACGC | 3845 | GCGUCGGACUUGCAGUCGA |
| siRNA 1795 | 1795 | CGACUGCAAGUCCGACGCC | 3846 | GGCGUCGGACUUGCAGUCG |
| siRNA 1797 | 1797 | ACUGCAAGUCCGACGCCUG | 3848 | CAGGCGUCGGACUUGCAGU |
| siRNA 1798 | 1798 | CUGCAAGUCCGACGCCUGC | 3849 | GCAGGCGUCGGACUUGCAG |
| siRNA 1799 | 1799 | UGCAAGUCCGACGCCUGCC | 3850 | GGCAGGCGUCGGACUUGCA |
| siRNA 1840 | 1840 | GGCCUGCGAGAAGAACGGC | 3891 | GCCGUUCUUCUCGCAGGCC |
| siRNA 1843 | 1843 | CUGCGAGAAGAACGGCGUG | 3894 | CACGCCGUUCUUCUCGCAG |
| siRNA 1849 | 1849 | GAAGAACGGCGUGGCUUAC | 3900 | GUAAGCCACGCCGUUCUUC |
| siRNA 1850 | 1850 | AAGAACGGCGUGGCUUACC | 3901 | GGUAAGCCACGCCGUUCUU |
| siRNA 1851 | 1851 | AGAACGGCGUGGCUUACCU | 3902 | AGGUAAGCCACGCCGUUCU |
| siRNA 1856 | 1856 | GGCGUGGCUUACCUCUACG | 3907 | CGUAGAGGUAAGCCACGCC |
| siRNA 1857 | 1857 | GCGUGGCUUACCUCUACGG | 3908 | CCGUAGAGGUAAGCCACGC |
| siRNA 1858 | 1858 | CGUGGCUUACCUCUACGGC | 3909 | GCCGUAGAGGUAAGCCACG |
| siRNA 1859 | 1859 | GUGGCUUACCUCUACGGCA | 3910 | UGCCGUAGAGGUAAGCCAC |
| siRNA 1860 | 1860 | UGGCUUACCUCUACGGCAU | 3911 | AUGCCGUAGAGGUAAGCCA |
| siRNA 1861 | 1861 | GGCUUACCUCUACGGCAUC | 3912 | GAUGCCGUAGAGGUAAGCC |
| siRNA 1862 | 1862 | GCUUACCUCUACGGCAUCA | 3913 | UGAUGCCGUAGAGGUAAGC |
| siRNA 1863 | 1863 | CUUACCUCUACGGCAUCAU | 3914 | AUGAUGCCGUAGAGGUAAG |
| siRNA 1864 | 1864 | UUACCUCUACGGCAUCAUC | 3915 | GAUGAUGCCGUAGAGGUAA |
| siRNA 1895 | 1895 | GGCUGCGGGCGGCUCCACA | 3946 | UGUGGAGCCGCCCGCAGCC |
| siRNA 1896 | 1896 | GCUGCGGGCGGCUCCACAA | 3947 | UUGUGGAGCCGCCCGCAGC |
| siRNA 1897 | 1897 | CUGCGGGCGGCUCCACAAG | 3948 | CUUGUGGAGCCGCCCGCAG |
| siRNA 1900 | 1900 | CGGGCGGCUCCACAAGCCG | 3951 | CGGCUUGUGGAGCCGCCCG |
| siRNA 1901 | 1901 | GGGCGGCUCCACAAGCCGG | 3952 | CCGGCUUGUGGAGCCGCCC |
| siRNA 1902 | 1902 | GGCGGCUCCACAAGCCGGG | 3953 | CCCGGCUUGUGGAGCCGCC |
| siRNA 1903 | 1903 | GCGGCUCCACAAGCCGGGG | 3954 | CCCCGGCUUGUGGAGCCGC |
| siRNA 1904 | 1904 | CGGCUCCACAAGCCGGGGG | 3955 | CCCCCGGCUUGUGGAGCCG |
| siRNA 1906 | 1906 | GCUCCACAAGCCGGGGGUC | 3957 | GACCCCCGGCUUGUGGAGC |
| siRNA 1908 | 1908 | UCCACAAGCCGGGGGUCUA | 3959 | UAGACCCCCGGCUUGUGGA |
| siRNA 1909 | 1909 | CCACAAGCCGGGGGUCUAC | 3960 | GUAGACCCCCGGCUUGUGG |
| siRNA 1910 | 1910 | CACAAGCCGGGGGUCUACA | 3961 | UGUAGACCCCCGGCUUGUG |
| siRNA 1917 | 1917 | CGGGGGUCUACACCCGCGU | 3968 | ACGCGGGUGUAGACCCCCG |
| siRNA 1927 | 1927 | CACCCGCGUGGCCAACUAU | 3978 | AUAGUUGGCCACGCGGGUG |
| siRNA 1928 | 1928 | ACCCGCGUGGCCAACUAUG | 3979 | CAUAGUUGGCCACGCGGGU |
| siRNA 1929 | 1929 | CCCGCGUGGCCAACUAUGU | 3980 | ACAUAGUUGGCCACGCGGG |
| siRNA 1937 | 1937 | GCCAACUAUGUGGACUGGA | 3988 | UCCAGUCCACAUAGUUGGC |
| siRNA 1966 | 1966 | GAUACGGCCUCCCAGGCGG | 4017 | CCGCCUGGGAGGCCGUAUC |
| siRNA 1967 | 1967 | AUACGGCCUCCCAGGCGGC | 4018 | GCCGCCUGGGAGGCCGUAU |
| siRNA 1974 | 1974 | CUCCCAGGCGGCUUGUGGC | 4025 | GCCACAAGCCGCCUGGGAG |
| siRNA 1979 | 1979 | AGGCGGCUUGUGGCUCCCU | 4030 | AGGGAGCCACAAGCCGCCU |
| siRNA 1999 | 1999 | CUGACCCUCCAGCGGGACA | 4050 | UGUCCCGCUGGAGGGUCAG |
| siRNA 2001 | 2001 | GACCCUCCAGCGGGACACC | 4052 | GGUGUCCCGCUGGAGGGUC |
| siRNA 2010 | 2010 | GCGGGACACCCUGGUUCCC | 4061 | GGGAACCAGGGUGUCCCGC |
| siRNA 1999 | 1999 | CUGACCCUCCAGCGGGACA | 4050 | UGUCCCGCUGGAGGGUCAG |
| siRNA 2001 | 2001 | GACCCUCCAGCGGGACACC | 4052 | GGUGUCCCGCUGGAGGGUC |
| siRNA 2010 | 2010 | GCGGGACACCCUGGUUCCC | 4061 | GGGAACCAGGGUGUCCCGC |

[0269] The siRNAs in subset B had the following characteristics: Cross-reactivity: With 19mer in human HGFAC mRNA; Specificity category: For human: AS2 or better, SS3 or better; miRNA seeds: AS+SS strand: seed region not conserved in human, mouse, and rat and not present in >4 species; Off-target frequency: <30 human off-targets matched with 2 mismatches in antisense strand; and SNPs: siRNA target sites do not harbor SNPs with a MAF≥1% (pos. 2-18).

[0270] The siRNA sequences in subset B were further selected for absence of seed regions in the AS strand that are identical to a seed region of known human miRNA to yield subset C. Subset C includes 248 siRNAs whose base sequences are shown in Table C.

TABLE C
Subset C

| | SEQ ID | sense strand | SEQ ID | antisense strand |
|---|---|---|---|---|
| siRNA NO: | NO: | sequence (5′-3′) | NO: | sequence (5′-3′) |
| siRNA 26 | 26 | UCAGGAGCCAUGGGGCGCU | 2077 | AGCGCCCCAUGGCUCCUGA |
| siRNA 116 | 116 | CUGCUGCCACGGGGGUUCC | 2167 | GGAACCCCCGUGGCAGCAG |
| siRNA 118 | 118 | GCUGCCACGGGGGUUCCAG | 2169 | CUGGAACCCCCGUGGCAGC |
| siRNA 136 | 136 | GCCCCAGCCUGGCGGGAAC | 2187 | GUUCCCGCCAGGCUGGGGC |
| siRNA 140 | 140 | CAGCCUGGCGGGAACCGUA | 2191 | UACGGUUCCCGCCAGGCUG |
| siRNA 141 | 141 | AGCCUGGCGGGAACCGUAC | 2192 | GUACGGUUCCCGCCAGGCU |
| siRNA 143 | 143 | CCUGGCGGGAACCGUACGG | 2194 | CCGUACGGUUCCCGCCAGG |
| siRNA 145 | 145 | UGGCGGGAACCGUACGGAG | 2196 | CUCCGUACGGUUCCCGCCA |
| siRNA 149 | 149 | GGGAACCGUACGGAGUCCC | 2200 | GGGACUCCGUACGGUUCCC |
| siRNA 155 | 155 | CGUACGGAGUCCCCAGAAC | 2206 | GUUCUGGGGACUCCGUACG |
| siRNA 158 | 158 | ACGGAGUCCCCAGAACCUA | 2209 | UAGGUUCUGGGGACUCCGU |
| siRNA 172 | 172 | ACCUAAUGCCACAGCGACC | 2223 | GGUCGCUGUGGCAUUAGGU |
| siRNA 202 | 202 | CACUAUCCUGGUGACCUCU | 2253 | AGAGGUCACCAGGAUAGUG |
| siRNA 232 | 232 | GACCCCAGCAACAAGUGCU | 2283 | AGCACUUGUUGCUGGGGUC |
| siRNA 294 | 294 | CCAGGGCAGUUCCCUCGAG | 2345 | CUCGAGGGAACUGCCCUGG |
| siRNA 295 | 295 | CAGGGCAGUUCCCUCGAGC | 2346 | GCUCGAGGGAACUGCCCUG |
| siRNA 296 | 296 | AGGGCAGUUCCCUCGAGCA | 2347 | UGCUCGAGGGAACUGCCCU |
| siRNA 301 | 301 | AGUUCCCUCGAGCAGUAGC | 2352 | GCUACUGCUCGAGGGAACU |
| siRNA 303 | 303 | UUCCCUCGAGCAGUAGCCC | 2354 | GGGCUACUGCUCGAGGGAA |
| siRNA 328 | 328 | CCAAGCACUCACCGAGGAC | 2379 | GUCCUCGGUGAGUGCUUGG |
| siRNA 334 | 334 | ACUCACCGAGGACGGGAGG | 2385 | CCUCCCGUCCUCGGUGAGU |
| siRNA 335 | 335 | CUCACCGAGGACGGGAGGC | 2386 | GCCUCCCGUCCUCGGUGAG |
| siRNA 360 | 360 | GGUUCCCCUUCCGCUACGG | 2411 | CCGUAGCGGAAGGGGAACC |
| siRNA 361 | 361 | GUUCCCCUUCCGCUACGGG | 2412 | CCCGUAGCGGAAGGGGAAC |
| siRNA 362 | 362 | UUCCCCUUCCGCUACGGGG | 2413 | CCCCGUAGCGGAAGGGGAA |
| siRNA 363 | 363 | UCCCCUUCCGCUACGGGGG | 2414 | CCCCCGUAGCGGAAGGGGA |
| siRNA 371 | 371 | CGCUACGGGGGCCGCAUGC | 2422 | GCAUGCGGCCCCCGUAGCG |
| siRNA 372 | 372 | GCUACGGGGGCCGCAUGCU | 2423 | AGCAUGCGGCCCCCGUAGC |
| siRNA 373 | 373 | CUACGGGGGCCGCAUGCUG | 2424 | CAGCAUGCGGCCCCCGUAG |
| siRNA 378 | 378 | GGGGCCGCAUGCUGCAUGC | 2429 | GCAUGCAGCAUGCGGCCCC |
| siRNA 389 | 389 | CUGCAUGCCUGCACUUCGG | 2440 | CCGAAGUGCAGGCAUGCAG |
| siRNA 391 | 391 | GCAUGCCUGCACUUCGGAG | 2442 | CUCCGAAGUGCAGGCAUGC |
| siRNA 398 | 398 | UGCACUUCGGAGGGCAGUG | 2449 | CACUGCCCUCCGAAGUGCA |
| siRNA 431 | 431 | UGUGCCACAACUCACAACU | 2482 | AGUUGUGAGUUGUGGCACA |
| siRNA 436 | 436 | CACAACUCACAACUACGAC | 2487 | GUCGUAGUUGUGAGUUGUG |
| siRNA 438 | 438 | CAACUCACAACUACGACCG | 2489 | CGGUCGUAGUUGUGAGUUG |
| siRNA 442 | 442 | UCACAACUACGACCGGGAC | 2493 | GUCCCGGUCGUAGUUGUGA |
| siRNA 445 | 445 | CAACUACGACCGGGACAGG | 2496 | CCUGUCCCGGUCGUAGUUG |
| siRNA 473 | 473 | UACUGUGUGGAGGCCACCC | 2524 | GGGUGGCCUCCACACAGUA |
| siRNA 530 | 530 | UCCGGCCCCUGCCUCAAUG | 2581 | CAUUGAGGCAGGGGCCGGA |
| siRNA 531 | 531 | CCGGCCCCUGCCUCAAUGG | 2582 | CCAUUGAGGCAGGGGCCGG |
| siRNA 533 | 533 | GGCCCCUGCCUCAAUGGAG | 2584 | CUCCAUUGAGGCAGGGGCC |
| siRNA 549 | 549 | GAGGCUCCUGCUCCAAUAC | 2600 | GUAUUGGAGCAGGAGCCUC |
| siRNA 558 | 558 | GCUCCAAUACCCAGGACCC | 2609 | GGGUCCUGGGUAUUGGAGC |
| siRNA 564 | 564 | AUACCCAGGACCCCCAGUC | 2615 | GACUGGGGGUCCUGGGUAU |
| siRNA 569 | 569 | CAGGACCCCCAGUCCUAUC | 2620 | GAUAGGACUGGGGGUCCUG |
| siRNA 601 | 601 | CCGGGCCUUCACCGGCAAG | 2652 | CUUGCCGGUGAAGGCCCGG |
| siRNA 602 | 602 | CGGGCCUUCACCGGCAAGG | 2653 | CCUUGCCGGUGAAGGCCCG |
| siRNA 612 | 612 | CCGGCAAGGACUGCGGCAC | 2663 | GUGCCGCAGUCCUUGCCGG |
| siRNA 616 | 616 | CAAGGACUGCGGCACAGAG | 2667 | CUCUGUGCCGCAGUCCUUG |
| siRNA 628 | 628 | CACAGAGAAAUGCUUUGAU | 2679 | AUCAAAGCAUUUCUCUGUG |
| siRNA 729 | 729 | GGGGCCGGACCUGGUGCGA | 2780 | UCGCACCAGGUCCGGCCCC |
| siRNA 730 | 730 | GGGCCGGACCUGGUGCGAA | 2781 | UUCGCACCAGGUCCGGCCC |
| siRNA 732 | 732 | GCCGGACCUGGUGCGAAGG | 2783 | CCUUCGCACCAGGUCCGGC |
| siRNA 733 | 733 | CCGGACCUGGUGCGAAGGC | 2784 | GCCUUCGCACCAGGUCCGG |
| siRNA 735 | 735 | GGACCUGGUGCGAAGGCAC | 2786 | GUGCCUUCGCACCAGGUCC |
| siRNA 738 | 738 | CCUGGUGCGAAGGCACCCG | 2789 | CGGGUGCCUUCGCACCAGG |
| siRNA 742 | 742 | GUGCGAAGGCACCCGACAU | 2793 | AUGUCGGGUGCCUUCGCAC |
| siRNA 743 | 743 | UGCGAAGGCACCCGACAUA | 2794 | UAUGUCGGGUGCCUUCGCA |
| siRNA 744 | 744 | GCGAAGGCACCCGACAUAC | 2795 | GUAUGUCGGGUGCCUUCGC |
| siRNA 749 | 749 | GGCACCCGACAUACAGCUU | 2800 | AAGCUGUAUGUCGGGUGCC |
| siRNA 751 | 751 | CACCCGACAUACAGCUUGU | 2802 | ACAAGCUGUAUGUCGGGUG |
| siRNA 753 | 753 | CCCGACAUACAGCUUGUCU | 2804 | AGACAAGCUGUAUGUCGGG |
| siRNA 754 | 754 | CCGACAUACAGCUUGUCUG | 2805 | CAGACAAGCUGUAUGUCGG |
| siRNA 756 | 756 | GACAUACAGCUUGUCUGAG | 2807 | CUCAGACAAGCUGUAUGUC |
| siRNA 776 | 776 | AGCCCUUGCCUGAACGGGG | 2827 | CCCCGUUCAGGCAAGGGCU |
| siRNA 796 | 796 | CACCUGCCACCUGAUCGUG | 2847 | CACGAUCAGGUGGCAGGUG |
| siRNA 799 | 799 | CUGCCACCUGAUCGUGGCC | 2850 | GGCCACGAUCAGGUGGCAG |
| siRNA 810 | 810 | UCGUGGCCACCGGGACCAC | 2861 | GUGGUCCCGGUGGCCACGA |
| siRNA 819 | 819 | CCGGGACCACCGUGUGUGC | 2870 | GCACACACGGUGGUCCCGG |
| siRNA 857 | 857 | GGACGGCUCUGCAACAUCG | 2908 | CGAUGUUGCAGAGCCGUCC |
| siRNA 858 | 858 | GACGGCUCUGCAACAUCGA | 2909 | UCGAUGUUGCAGAGCCGUC |
| siRNA 859 | 859 | ACGGCUCUGCAACAUCGAG | 2910 | CUCGAUGUUGCAGAGCCGU |
| siRNA 861 | 861 | GGCUCUGCAACAUCGAGCC | 2912 | GGCUCGAUGUUGCAGAGCC |
| siRNA 862 | 862 | GCUCUGCAACAUCGAGCCU | 2913 | AGGCUCGAUGUUGCAGAGC |
| siRNA 863 | 863 | CUCUGCAACAUCGAGCCUG | 2914 | CAGGCUCGAUGUUGCAGAG |
| siRNA 871 | 871 | CAUCGAGCCUGAUGAGCGC | 2922 | GCGCUCAUCAGGCUCGAUG |
| siRNA 872 | 872 | AUCGAGCCUGAUGAGCGCU | 2923 | AGCGCUCAUCAGGCUCGAU |
| siRNA 873 | 873 | UCGAGCCUGAUGAGCGCUG | 2924 | CAGCGCUCAUCAGGCUCGA |
| siRNA 875 | 875 | GAGCCUGAUGAGCGCUGCU | 2926 | AGCAGCGCUCAUCAGGCUC |
| siRNA 879 | 879 | CUGAUGAGCGCUGCUUCUU | 2930 | AAGAAGCAGCGCUCAUCAG |
| siRNA 896 | 896 | UUGGGGAACGGCACUGGGU | 2947 | ACCCAGUGCCGUUCCCCAA |
| siRNA 901 | 901 | GAACGGCACUGGGUACCGU | 2952 | ACGGUACCCAGUGCCGUUC |
| siRNA 902 | 902 | AACGGCACUGGGUACCGUG | 2953 | CACGGUACCCAGUGCCGUU |
| siRNA 908 | 908 | ACUGGGUACCGUGGCGUGG | 2959 | CCACGCCACGGUACCCAGU |
| siRNA 909 | 909 | CUGGGUACCGUGGCGUGGC | 2960 | GCCACGCCACGGUACCCAG |
| siRNA 910 | 910 | UGGGUACCGUGGCGUGGCC | 2961 | GGCCACGCCACGGUACCCA |
| siRNA 911 | 911 | GGGUACCGUGGCGUGGCCA | 2962 | UGGCCACGCCACGGUACCC |
| siRNA 916 | 916 | CCGUGGCGUGGCCAGCACC | 2967 | GGUGCUGGCCACGCCACGG |
| siRNA 957 | 957 | UGGCCUGGAACUCCGAUCU | 3008 | AGAUCGGAGUUCCAGGCCA |
| siRNA 960 | 960 | CCUGGAACUCCGAUCUGCU | 3011 | AGCAGAUCGGAGUUCCAGG |
| siRNA 961 | 961 | CUGGAACUCCGAUCUGCUC | 3012 | GAGCAGAUCGGAGUUCCAG |
| siRNA 964 | 964 | GAACUCCGAUCUGCUCUAC | 3015 | GUAGAGCAGAUCGGAGUUC |
| siRNA 992 | 992 | CACGUGGACUCCGUGGGCG | 3043 | CGCCCACGGAGUCCACGUG |
| siRNA 996 | 996 | UGGACUCCGUGGGCGCCGC | 3047 | GCGGCGCCCACGGAGUCCA |
| siRNA 998 | 998 | GACUCCGUGGGCGCCGCGG | 3049 | CCGCGGCGCCCACGGAGUC |
| siRNA 1033 | 1033 | CCCCCAUGCCUACUGCCGG | 3084 | CCGGCAGUAGGCAUGGGGG |
| siRNA 1034 | 1034 | CCCCAUGCCUACUGCCGGA | 3085 | UCCGGCAGUAGGCAUGGGG |
| siRNA 1035 | 1035 | CCCAUGCCUACUGCCGGAA | 3086 | UUCCGGCAGUAGGCAUGGG |
| siRNA 1040 | 1040 | GCCUACUGCCGGAAUCCGG | 3091 | CCGGAUUCCGGCAGUAGGC |
| siRNA 1041 | 1041 | CCUACUGCCGGAAUCCGGA | 3092 | UCCGGAUUCCGGCAGUAGG |
| siRNA 1042 | 1042 | CUACUGCCGGAAUCCGGAC | 3093 | GUCCGGAUUCCGGCAGUAG |
| siRNA 1043 | 1043 | UACUGCCGGAAUCCGGACA | 3094 | UGUCCGGAUUCCGGCAGUA |
| siRNA 1050 | 1050 | GGAAUCCGGACAAUGACGA | 3101 | UCGUCAUUGUCCGGAUUCC |
| siRNA 1051 | 1051 | GAAUCCGGACAAUGACGAG | 3102 | CUCGUCAUUGUCCGGAUUC |
| siRNA 1052 | 1052 | AAUCCGGACAAUGACGAGA | 3103 | UCUCGUCAUUGUCCGGAUU |
| siRNA 1053 | 1053 | AUCCGGACAAUGACGAGAG | 3104 | CUCUCGUCAUUGUCCGGAU |
| siRNA 1067 | 1067 | GAGAGGCCCUGGUGCUACG | 3118 | CGUAGCACCAGGGCCUCUC |
| siRNA 1100 | 1100 | GCGCUCUCCUGGGAGUACU | 3151 | AGUACUCCCAGGAGAGCGC |
| siRNA 1121 | 1121 | CGCCUGGAGGCCUGCGAAU | 3172 | AUUCGCAGGCCUCCAGGCG |
| siRNA 1122 | 1122 | GCCUGGAGGCCUGCGAAUC | 3173 | GAUUCGCAGGCCUCCAGGC |
| siRNA 1123 | 1123 | CCUGGAGGCCUGCGAAUCC | 3174 | GGAUUCGCAGGCCUCCAGG |
| siRNA 1133 | 1133 | UGCGAAUCCCUCACCAGAG | 3184 | CUCUGGUGAGGGAUUCGCA |
| siRNA 1143 | 1143 | UCACCAGAGUCCAACUGUC | 3194 | GACAGUUGGACUCUGGUGA |
| siRNA 1149 | 1149 | GAGUCCAACUGUCACCGGA | 3200 | UCCGGUGACAGUUGGACUC |
| siRNA 1151 | 1151 | GUCCAACUGUCACCGGAUC | 3202 | GAUCCGGUGACAGUUGGAC |
| siRNA 1153 | 1153 | CCAACUGUCACCGGAUCUC | 3204 | GAGAUCCGGUGACAGUUGG |
| siRNA 1203 | 1203 | GGCGCCAGGCCUGCGGCAG | 3254 | CUGCCGCAGGCCUGGCGCC |
| siRNA 1215 | 1215 | GCGGCAGGAGGCACAAGAA | 3266 | UUCUUGUGCCUCCUGCCGC |
| siRNA 1224 | 1224 | GGCACAAGAAGAGGACGUU | 3275 | AACGUCCUCUUCUUGUGCC |
| siRNA 1225 | 1225 | GCACAAGAAGAGGACGUUC | 3276 | GAACGUCCUCUUCUUGUGC |
| siRNA 1226 | 1226 | CACAAGAAGAGGACGUUCC | 3277 | GGAACGUCCUCUUCUUGUG |
| siRNA 1235 | 1235 | AGGACGUUCCUGCGGCCAC | 3286 | GUGGCCGCAGGAACGUCCU |
| siRNA 1238 | 1238 | ACGUUCCUGCGGCCACGUA | 3289 | UACGUGGCCGCAGGAACGU |
| siRNA 1240 | 1240 | GUUCCUGCGGCCACGUAUC | 3291 | GAUACGUGGCCGCAGGAAC |
| siRNA 1242 | 1242 | UCCUGCGGCCACGUAUCAU | 3293 | AUGAUACGUGGCCGCAGGA |
| siRNA 1243 | 1243 | CCUGCGGCCACGUAUCAUC | 3294 | GAUGAUACGUGGCCGCAGG |
| siRNA 1246 | 1246 | GCGGCCACGUAUCAUCGGC | 3297 | GCCGAUGAUACGUGGCCGC |
| siRNA 1247 | 1247 | CGGCCACGUAUCAUCGGCG | 3298 | CGCCGAUGAUACGUGGCCG |
| siRNA 1248 | 1248 | GGCCACGUAUCAUCGGCGG | 3299 | CCGCCGAUGAUACGUGGCC |
| siRNA 1249 | 1249 | GCCACGUAUCAUCGGCGGC | 3300 | GCCGCCGAUGAUACGUGGC |
| siRNA 1274 | 1274 | UCGCUGCCCGGCUCGCACC | 3325 | GGUGCGAGCCGGGCAGCGA |
| siRNA 1299 | 1299 | UGGCCGCCAUCUACAUCGG | 3350 | CCGAUGUAGAUGGCGGCCA |
| siRNA 1312 | 1312 | CAUCGGGGACAGCUUCUGC | 3363 | GCAGAAGCUGUCCCCGAUG |
| siRNA 1315 | 1315 | CGGGGACAGCUUCUGCGCC | 3366 | GGCGCAGAAGCUGUCCCCG |
| siRNA 1318 | 1318 | GGACAGCUUCUGCGCCGGG | 3369 | CCCGGCGCAGAAGCUGUCC |
| siRNA 1319 | 1319 | GACAGCUUCUGCGCCGGGA | 3370 | UCCCGGCGCAGAAGCUGUC |
| siRNA 1352 | 1352 | UGCUGGGUGGUGUCGGCCG | 3403 | CGGCCGACACCACCCAGCA |
| siRNA 1389 | 1389 | GCCCCCCCAGGGACAGCGU | 3440 | ACGCUGUCCCUGGGGGGGC |
| siRNA 1390 | 1390 | CCCCCCCAGGGACAGCGUC | 3441 | GACGCUGUCCCUGGGGGGG |
| siRNA 1392 | 1392 | CCCCCAGGGACAGCGUCUC | 3443 | GAGACGCUGUCCCUGGGGG |
| siRNA 1424 | 1424 | CAGCACUUCUUCAACCGCA | 3475 | UGCGGUUGAAGAAGUGCUG |
| siRNA 1427 | 1427 | CACUUCUUCAACCGCACGA | 3478 | UCGUGCGGUUGAAGAAGUG |
| siRNA 1430 | 1430 | UUCUUCAACCGCACGACGG | 3481 | CCGUCGUGCGGUUGAAGAA |
| siRNA 1431 | 1431 | UCUUCAACCGCACGACGGA | 3482 | UCCGUCGUGCGGUUGAAGA |
| siRNA 1432 | 1432 | CUUCAACCGCACGACGGAC | 3483 | GUCCGUCGUGCGGUUGAAG |
| siRNA 1433 | 1433 | UUCAACCGCACGACGGACG | 3484 | CGUCCGUCGUGCGGUUGAA |
| siRNA 1434 | 1434 | UCAACCGCACGACGGACGU | 3485 | ACGUCCGUCGUGCGGUUGA |
| siRNA 1435 | 1435 | CAACCGCACGACGGACGUG | 3486 | CACGUCCGUCGUGCGGUUG |
| siRNA 1438 | 1438 | CCGCACGACGGACGUGACG | 3489 | CGUCACGUCCGUCGUGCGG |
| siRNA 1439 | 1439 | CGCACGACGGACGUGACGC | 3490 | GCGUCACGUCCGUCGUGCG |
| siRNA 1440 | 1440 | GCACGACGGACGUGACGCA | 3491 | UGCGUCACGUCCGUCGUGC |
| siRNA 1441 | 1441 | CACGACGGACGUGACGCAG | 3492 | CUGCGUCACGUCCGUCGUG |
| siRNA 1443 | 1443 | CGACGGACGUGACGCAGAC | 3494 | GUCUGCGUCACGUCCGUCG |
| siRNA 1446 | 1446 | CGGACGUGACGCAGACCUU | 3497 | AAGGUCUGCGUCACGUCCG |
| siRNA 1449 | 1449 | ACGUGACGCAGACCUUCGG | 3500 | CCGAAGGUCUGCGUCACGU |
| siRNA 1452 | 1452 | UGACGCAGACCUUCGGCAU | 3503 | AUGCCGAAGGUCUGCGUCA |
| siRNA 1453 | 1453 | GACGCAGACCUUCGGCAUC | 3504 | GAUGCCGAAGGUCUGCGUC |
| siRNA 1455 | 1455 | CGCAGACCUUCGGCAUCGA | 3506 | UCGAUGCCGAAGGUCUGCG |
| siRNA 1456 | 1456 | GCAGACCUUCGGCAUCGAG | 3507 | CUCGAUGCCGAAGGUCUGC |
| siRNA 1459 | 1459 | GACCUUCGGCAUCGAGAAG | 3510 | CUUCUCGAUGCCGAAGGUC |
| siRNA 1463 | 1463 | UUCGGCAUCGAGAAGUACA | 3514 | UGUACUUCUCGAUGCCGAA |
| siRNA 1464 | 1464 | UCGGCAUCGAGAAGUACAU | 3515 | AUGUACUUCUCGAUGCCGA |
| siRNA 1469 | 1469 | AUCGAGAAGUACAUCCCGU | 3520 | ACGGGAUGUACUUCUCGAU |
| siRNA 1471 | 1471 | CGAGAAGUACAUCCCGUAC | 3522 | GUACGGGAUGUACUUCUCG |
| siRNA 1475 | 1475 | AAGUACAUCCCGUACACCC | 3526 | GGGUGUACGGGAUGUACUU |
| siRNA 1477 | 1477 | GUACAUCCCGUACACCCUG | 3528 | CAGGGUGUACGGGAUGUAC |
| siRNA 1504 | 1504 | GUUCAACCCCAGCGACCAC | 3555 | GUGGUCGCUGGGGUUGAAC |
| siRNA 1506 | 1506 | UCAACCCCAGCGACCACGA | 3557 | UCGUGGUCGCUGGGGUUGA |
| siRNA 1509 | 1509 | ACCCCAGCGACCACGACCU | 3560 | AGGUCGUGGUCGCUGGGGU |
| siRNA 1512 | 1512 | CCAGCGACCACGACCUCGU | 3563 | ACGAGGUCGUGGUCGCUGG |
| siRNA 1513 | 1513 | CAGCGACCACGACCUCGUC | 3564 | GACGAGGUCGUGGUCGCUG |
| siRNA 1516 | 1516 | CGACCACGACCUCGUCCUG | 3567 | CAGGACGAGGUCGUGGUCG |
| siRNA 1518 | 1518 | ACCACGACCUCGUCCUGAU | 3569 | AUCAGGACGAGGUCGUGGU |
| siRNA 1519 | 1519 | CCACGACCUCGUCCUGAUC | 3570 | GAUCAGGACGAGGUCGUGG |
| siRNA 1521 | 1521 | ACGACCUCGUCCUGAUCCG | 3572 | CGGAUCAGGACGAGGUCGU |
| siRNA 1523 | 1523 | GACCUCGUCCUGAUCCGGC | 3574 | GCCGGAUCAGGACGAGGUC |
| siRNA 1524 | 1524 | ACCUCGUCCUGAUCCGGCU | 3575 | AGCCGGAUCAGGACGAGGU |
| siRNA 1528 | 1528 | CGUCCUGAUCCGGCUGAAG | 3579 | CUUCAGCCGGAUCAGGACG |
| siRNA 1563 | 1563 | GUGCCACACGCUCGCAGUU | 3614 | AACUGCGAGCGUGUGGCAC |
| siRNA 1564 | 1564 | UGCCACACGCUCGCAGUUC | 3615 | GAACUGCGAGCGUGUGGCA |
| siRNA 1565 | 1565 | GCCACACGCUCGCAGUUCG | 3616 | CGAACUGCGAGCGUGUGGC |
| siRNA 1566 | 1566 | CCACACGCUCGCAGUUCGU | 3617 | ACGAACUGCGAGCGUGUGG |
| siRNA 1567 | 1567 | CACACGCUCGCAGUUCGUG | 3618 | CACGAACUGCGAGCGUGUG |
| siRNA 1568 | 1568 | ACACGCUCGCAGUUCGUGC | 3619 | GCACGAACUGCGAGCGUGU |
| siRNA 1572 | 1572 | GCUCGCAGUUCGUGCAGCC | 3623 | GGCUGCACGAACUGCGAGC |
| siRNA 1622 | 1622 | CCCGCAGGACACAAGUGCC | 3673 | GGCACUUGUGUCCUGCGGG |
| siRNA 1623 | 1623 | CCGCAGGACACAAGUGCCA | 3674 | UGGCACUUGUGUCCUGCGG |
| siRNA 1624 | 1624 | CGCAGGACACAAGUGCCAG | 3675 | CUGGCACUUGUGUCCUGCG |
| siRNA 1628 | 1628 | GGACACAAGUGCCAGAUUG | 3679 | CAAUCUGGCACUUGUGUCC |
| siRNA 1630 | 1630 | ACACAAGUGCCAGAUUGCG | 3681 | CGCAAUCUGGCACUUGUGU |
| siRNA 1631 | 1631 | CACAAGUGCCAGAUUGCGG | 3682 | CCGCAAUCUGGCACUUGUG |
| siRNA 1651 | 1651 | CUGGGGCCACUUGGAUGAG | 3702 | CUCAUCCAAGUGGCCCCAG |
| siRNA 1662 | 1662 | UGGAUGAGAACGUGAGCGG | 3713 | CCGCUCACGUUCUCAUCCA |
| siRNA 1663 | 1663 | GGAUGAGAACGUGAGCGGC | 3714 | GCCGCUCACGUUCUCAUCC |
| siRNA 1672 | 1672 | CGUGAGCGGCUACUCCAGC | 3723 | GCUGGAGUAGCCGCUCACG |
| siRNA 1709 | 1709 | GUCCCCCUGGUCGCCGACC | 3760 | GGUCGGCGACCAGGGGGAC |
| siRNA 1712 | 1712 | CCCCUGGUCGCCGACCACA | 3763 | UGUGGUCGGCGACCAGGGG |
| siRNA 1713 | 1713 | CCCUGGUCGCCGACCACAA | 3764 | UUGUGGUCGGCGACCAGGG |
| siRNA 1716 | 1716 | UGGUCGCCGACCACAAGUG | 3767 | CACUUGUGGUCGGCGACCA |
| siRNA 1718 | 1718 | GUCGCCGACCACAAGUGCA | 3769 | UGCACUUGUGGUCGGCGAC |
| siRNA 1722 | 1722 | CCGACCACAAGUGCAGCAG | 3773 | CUGCUGCACUUGUGGUCGG |
| siRNA 1737 | 1737 | GCAGCCCUGAGGUCUACGG | 3788 | CCGUAGACCUCAGGGCUGC |
| siRNA 1739 | 1739 | AGCCCUGAGGUCUACGGCG | 3790 | CGCCGUAGACCUCAGGGCU |
| siRNA 1743 | 1743 | CUGAGGUCUACGGCGCCGA | 3794 | UCGGCGCCGUAGACCUCAG |
| siRNA 1745 | 1745 | GAGGUCUACGGCGCCGACA | 3796 | UGUCGGCGCCGUAGACCUC |
| siRNA 1749 | 1749 | UCUACGGCGCCGACAUCAG | 3800 | CUGAUGUCGGCGCCGUAGA |
| siRNA 1752 | 1752 | ACGGCGCCGACAUCAGCCC | 3803 | GGGCUGAUGUCGGCGCCGU |
| siRNA 1770 | 1770 | CCAACAUGCUCUGUGCCGG | 3821 | CCGGCACAGAGCAUGUUGG |
| siRNA 1780 | 1780 | CUGUGCCGGCUACUUCGAC | 3831 | GUCGAAGUAGCCGGCACAG |
| siRNA 1781 | 1781 | UGUGCCGGCUACUUCGACU | 3832 | AGUCGAAGUAGCCGGCACA |
| siRNA 1782 | 1782 | GUGCCGGCUACUUCGACUG | 3833 | CAGUCGAAGUAGCCGGCAC |
| siRNA 1783 | 1783 | UGCCGGCUACUUCGACUGC | 3834 | GCAGUCGAAGUAGCCGGCA |
| siRNA 1785 | 1785 | CCGGCUACUUCGACUGCAA | 3836 | UUGCAGUCGAAGUAGCCGG |
| siRNA 1788 | 1788 | GCUACUUCGACUGCAAGUC | 3839 | GACUUGCAGUCGAAGUAGC |
| siRNA 1789 | 1789 | CUACUUCGACUGCAAGUCC | 3840 | GGACUUGCAGUCGAAGUAG |
| siRNA 1791 | 1791 | ACUUCGACUGCAAGUCCGA | 3842 | UCGGACUUGCAGUCGAAGU |
| siRNA 1792 | 1792 | CUUCGACUGCAAGUCCGAC | 3843 | GUCGGACUUGCAGUCGAAG |
| siRNA 1793 | 1793 | UUCGACUGCAAGUCCGACG | 3844 | CGUCGGACUUGCAGUCGAA |
| siRNA 1794 | 1794 | UCGACUGCAAGUCCGACGC | 3845 | GCGUCGGACUUGCAGUCGA |
| siRNA 1795 | 1795 | CGACUGCAAGUCCGACGCC | 3846 | GGCGUCGGACUUGCAGUCG |
| siRNA 1799 | 1799 | UGCAAGUCCGACGCCUGCC | 3850 | GGCAGGCGUCGGACUUGCA |
| siRNA 1840 | 1840 | GGCCUGCGAGAAGAACGGC | 3891 | GCCGUUCUUCUCGCAGGCC |
| siRNA 1843 | 1843 | CUGCGAGAAGAACGGCGUG | 3894 | CACGCCGUUCUUCUCGCAG |
| siRNA 1849 | 1849 | GAAGAACGGCGUGGCUUAC | 3900 | GUAAGCCACGCCGUUCUUC |
| siRNA 1850 | 1850 | AAGAACGGCGUGGCUUACC | 3901 | GGUAAGCCACGCCGUUCUU |
| siRNA 1851 | 1851 | AGAACGGCGUGGCUUACCU | 3902 | AGGUAAGCCACGCCGUUCU |
| siRNA 1857 | 1857 | GCGUGGCUUACCUCUACGG | 3908 | CCGUAGAGGUAAGCCACGC |
| siRNA 1858 | 1858 | CGUGGCUUACCUCUACGGC | 3909 | GCCGUAGAGGUAAGCCACG |
| siRNA 1859 | 1859 | GUGGCUUACCUCUACGGCA | 3910 | UGCCGUAGAGGUAAGCCAC |
| siRNA 1860 | 1860 | UGGCUUACCUCUACGGCAU | 3911 | AUGCCGUAGAGGUAAGCCA |
| siRNA 1861 | 1861 | GGCUUACCUCUACGGCAUC | 3912 | GAUGCCGUAGAGGUAAGCC |
| siRNA 1862 | 1862 | GCUUACCUCUACGGCAUCA | 3913 | UGAUGCCGUAGAGGUAAGC |
| siRNA 1863 | 1863 | CUUACCUCUACGGCAUCAU | 3914 | AUGAUGCCGUAGAGGUAAG |
| siRNA 1897 | 1897 | CUGCGGGCGGCUCCACAAG | 3948 | CUUGUGGAGCCGCCCGCAG |
| siRNA 1900 | 1900 | CGGGCGGCUCCACAAGCCG | 3951 | CGGCUUGUGGAGCCGCCCG |
| siRNA 1901 | 1901 | GGGCGGCUCCACAAGCCGG | 3952 | CCGGCUUGUGGAGCCGCCC |
| siRNA 1902 | 1902 | GGCGGCUCCACAAGCCGGG | 3953 | CCCGGCUUGUGGAGCCGCC |
| siRNA 1903 | 1903 | GCGGCUCCACAAGCCGGGG | 3954 | CCCCGGCUUGUGGAGCCGC |
| siRNA 1908 | 1908 | UCCACAAGCCGGGGGUCUA | 3959 | UAGACCCCCGGCUUGUGGA |
| siRNA 1910 | 1910 | CACAAGCCGGGGGUCUACA | 3961 | UGUAGACCCCCGGCUUGUG |
| siRNA 1917 | 1917 | CGGGGGUCUACACCCGCGU | 3968 | ACGCGGGUGUAGACCCCCG |
| siRNA 1927 | 1927 | CACCCGCGUGGCCAACUAU | 3978 | AUAGUUGGCCACGCGGGUG |
| siRNA 1928 | 1928 | ACCCGCGUGGCCAACUAUG | 3979 | CAUAGUUGGCCACGCGGGU |
| siRNA 1929 | 1929 | CCCGCGUGGCCAACUAUGU | 3980 | ACAUAGUUGGCCACGCGGG |
| siRNA 1937 | 1937 | GCCAACUAUGUGGACUGGA | 3988 | UCCAGUCCACAUAGUUGGC |
| siRNA 1974 | 1974 | CUCCCAGGCGGCUUGUGGC | 4025 | GCCACAAGCCGCCUGGGAG |
| siRNA 2010 | 2010 | GCGGGACACCCUGGUUCCC | 4061 | GGGAACCAGGGUGUCCCGC |

[0271] The siRNAs in subset C had the following characteristics: Cross-reactivity: With 19mer in human HGFAC mRNA; Specificity category: For human: AS2 or better, SS3 or better; miRNA seeds: AS+SS strand: seed region not conserved in human, mouse, and rat and not present in >4 species. AS strand: seed region not identical to seed region of known human miRNA; Off-target frequency: ≤30 human off-targets matched with 2 mismatches by antisense strand; and SNPs: siRNA target sites do not harbor SNPs with a MAF≥1% (pos. 2-18).

[0272] siRNA sequences in subset C were also selected for absence of seed regions in the AS or S strands that are identical to a seed region of known human miRNA in addition to having an off-target frequency of ≤20 human off-targets matched with 2 mismatches by antisense strand to yield subset D. Subset D includes 154 siRNAs whose base sequences are shown in Table D.

TABLE D
Subset D

| | SEQ ID | sense strand | SEQ ID | antisense strand |
|---|---|---|---|---|
| siRNA NO: | NO: | sequence (5′-3′) | NO: | sequence (5′-3′) |
| siRNA 116 | 116 | CUGCUGCCACGGGGGUUCC | 2167 | GGAACCCCCGUGGCAGCAG |
| siRNA 136 | 136 | GCCCCAGCCUGGCGGGAAC | 2187 | GUUCCCGCCAGGCUGGGGC |
| siRNA 143 | 143 | CCUGGCGGGAACCGUACGG | 2194 | CCGUACGGUUCCCGCCAGG |
| siRNA 149 | 149 | GGGAACCGUACGGAGUCCC | 2200 | GGGACUCCGUACGGUUCCC |
| siRNA 155 | 155 | CGUACGGAGUCCCCAGAAC | 2206 | GUUCUGGGGACUCCGUACG |
| siRNA 158 | 158 | ACGGAGUCCCCAGAACCUA | 2209 | UAGGUUCUGGGGACUCCGU |
| siRNA 172 | 172 | ACCUAAUGCCACAGCGACC | 2223 | GGUCGCUGUGGCAUUAGGU |
| siRNA 202 | 202 | CACUAUCCUGGUGACCUCU | 2253 | AGAGGUCACCAGGAUAGUG |
| siRNA 232 | 232 | GACCCCAGCAACAAGUGCU | 2283 | AGCACUUGUUGCUGGGGUC |
| siRNA 328 | 328 | CCAAGCACUCACCGAGGAC | 2379 | GUCCUCGGUGAGUGCUUGG |
| siRNA 335 | 335 | CUCACCGAGGACGGGAGGC | 2386 | GCCUCCCGUCCUCGGUGAG |
| siRNA 371 | 371 | CGCUACGGGGGCCGCAUGC | 2422 | GCAUGCGGCCCCCGUAGCG |
| siRNA 372 | 372 | GCUACGGGGGCCGCAUGCU | 2423 | AGCAUGCGGCCCCCGUAGC |
| siRNA 373 | 373 | CUACGGGGGCCGCAUGCUG | 2424 | CAGCAUGCGGCCCCCGUAG |
| siRNA 391 | 391 | GCAUGCCUGCACUUCGGAG | 2442 | CUCCGAAGUGCAGGCAUGC |
| siRNA 398 | 398 | UGCACUUCGGAGGGCAGUG | 2449 | CACUGCCCUCCGAAGUGCA |
| siRNA 436 | 436 | CACAACUCACAACUACGAC | 2487 | GUCGUAGUUGUGAGUUGUG |
| siRNA 549 | 549 | GAGGCUCCUGCUCCAAUAC | 2600 | GUAUUGGAGCAGGAGCCUC |
| siRNA 569 | 569 | CAGGACCCCCAGUCCUAUC | 2620 | GAUAGGACUGGGGGUCCUG |
| siRNA 612 | 612 | CCGGCAAGGACUGCGGCAC | 2663 | GUGCCGCAGUCCUUGCCGG |
| siRNA 733 | 733 | CCGGACCUGGUGCGAAGGC | 2784 | GCCUUCGCACCAGGUCCGG |
| siRNA 742 | 742 | GUGCGAAGGCACCCGACAU | 2793 | AUGUCGGGUGCCUUCGCAC |
| siRNA 743 | 743 | UGCGAAGGCACCCGACAUA | 2794 | UAUGUCGGGUGCCUUCGCA |
| siRNA 744 | 744 | GCGAAGGCACCCGACAUAC | 2795 | GUAUGUCGGGUGCCUUCGC |
| siRNA 749 | 749 | GGCACCCGACAUACAGCUU | 2800 | AAGCUGUAUGUCGGGUGCC |
| siRNA 751 | 751 | CACCCGACAUACAGCUUGU | 2802 | ACAAGCUGUAUGUCGGGUG |
| siRNA 753 | 753 | CCCGACAUACAGCUUGUCU | 2804 | AGACAAGCUGUAUGUCGGG |
| siRNA 754 | 754 | CCGACAUACAGCUUGUCUG | 2805 | CAGACAAGCUGUAUGUCGG |
| siRNA 756 | 756 | GACAUACAGCUUGUCUGAG | 2807 | CUCAGACAAGCUGUAUGUC |
| siRNA 796 | 796 | CACCUGCCACCUGAUCGUG | 2847 | CACGAUCAGGUGGCAGGUG |
| siRNA 819 | 819 | CCGGGACCACCGUGUGUGC | 2870 | GCACACACGGUGGUCCCGG |
| siRNA 857 | 857 | GGACGGCUCUGCAACAUCG | 2908 | CGAUGUUGCAGAGCCGUCC |
| siRNA 858 | 858 | GACGGCUCUGCAACAUCGA | 2909 | UCGAUGUUGCAGAGCCGUC |
| siRNA 863 | 863 | CUCUGCAACAUCGAGCCUG | 2914 | CAGGCUCGAUGUUGCAGAG |
| siRNA 871 | 871 | CAUCGAGCCUGAUGAGCGC | 2922 | GCGCUCAUCAGGCUCGAUG |
| siRNA 872 | 872 | AUCGAGCCUGAUGAGCGCU | 2923 | AGCGCUCAUCAGGCUCGAU |
| siRNA 873 | 873 | UCGAGCCUGAUGAGCGCUG | 2924 | CAGCGCUCAUCAGGCUCGA |
| siRNA 879 | 879 | CUGAUGAGCGCUGCUUCUU | 2930 | AAGAAGCAGCGCUCAUCAG |
| siRNA 910 | 910 | UGGGUACCGUGGCGUGGCC | 2961 | GGCCACGCCACGGUACCCA |
| siRNA 911 | 911 | GGGUACCGUGGCGUGGCCA | 2962 | UGGCCACGCCACGGUACCC |
| siRNA 961 | 961 | CUGGAACUCCGAUCUGCUC | 3012 | GAGCAGAUCGGAGUUCCAG |
| siRNA 964 | 964 | GAACUCCGAUCUGCUCUAC | 3015 | GUAGAGCAGAUCGGAGUUC |
| siRNA 992 | 992 | CACGUGGACUCCGUGGGCG | 3043 | CGCCCACGGAGUCCACGUG |
| siRNA 996 | 996 | UGGACUCCGUGGGCGCCGC | 3047 | GCGGCGCCCACGGAGUCCA |
| siRNA 998 | 998 | GACUCCGUGGGCGCCGCGG | 3049 | CCGCGGCGCCCACGGAGUC |
| siRNA 1033 | 1033 | CCCCCAUGCCUACUGCCGG | 3084 | CCGGCAGUAGGCAUGGGGG |
| siRNA 1034 | 1034 | CCCCAUGCCUACUGCCGGA | 3085 | UCCGGCAGUAGGCAUGGGG |
| siRNA 1040 | 1040 | GCCUACUGCCGGAAUCCGG | 3091 | CCGGAUUCCGGCAGUAGGC |
| siRNA 1041 | 1041 | CCUACUGCCGGAAUCCGGA | 3092 | UCCGGAUUCCGGCAGUAGG |
| siRNA 1042 | 1042 | CUACUGCCGGAAUCCGGAC | 3093 | GUCCGGAUUCCGGCAGUAG |
| siRNA 1043 | 1043 | UACUGCCGGAAUCCGGACA | 3094 | UGUCCGGAUUCCGGCAGUA |
| siRNA 1050 | 1050 | GGAAUCCGGACAAUGACGA | 3101 | UCGUCAUUGUCCGGAUUCC |
| siRNA 1051 | 1051 | GAAUCCGGACAAUGACGAG | 3102 | CUCGUCAUUGUCCGGAUUC |
| siRNA 1052 | 1052 | AAUCCGGACAAUGACGAGA | 3103 | UCUCGUCAUUGUCCGGAUU |
| siRNA 1053 | 1053 | AUCCGGACAAUGACGAGAG | 3104 | CUCUCGUCAUUGUCCGGAU |
| siRNA 1067 | 1067 | GAGAGGCCCUGGUGCUACG | 3118 | CGUAGCACCAGGGCCUCUC |
| siRNA 1123 | 1123 | CCUGGAGGCCUGCGAAUCC | 3174 | GGAUUCGCAGGCCUCCAGG |
| siRNA 1133 | 1133 | UGCGAAUCCCUCACCAGAG | 3184 | CUCUGGUGAGGGAUUCGCA |
| siRNA 1149 | 1149 | GAGUCCAACUGUCACCGGA | 3200 | UCCGGUGACAGUUGGACUC |
| siRNA 1151 | 1151 | GUCCAACUGUCACCGGAUC | 3202 | GAUCCGGUGACAGUUGGAC |
| siRNA 1153 | 1153 | CCAACUGUCACCGGAUCUC | 3204 | GAGAUCCGGUGACAGUUGG |
| siRNA 1203 | 1203 | GGCGCCAGGCCUGCGGCAG | 3254 | CUGCCGCAGGCCUGGCGCC |
| siRNA 1215 | 1215 | GCGGCAGGAGGCACAAGAA | 3266 | UUCUUGUGCCUCCUGCCGC |
| siRNA 1224 | 1224 | GGCACAAGAAGAGGACGUU | 3275 | AACGUCCUCUUCUUGUGCC |
| siRNA 1226 | 1226 | CACAAGAAGAGGACGUUCC | 3277 | GGAACGUCCUCUUCUUGUG |
| siRNA 1235 | 1235 | AGGACGUUCCUGCGGCCAC | 3286 | GUGGCCGCAGGAACGUCCU |
| siRNA 1238 | 1238 | ACGUUCCUGCGGCCACGUA | 3289 | UACGUGGCCGCAGGAACGU |
| siRNA 1246 | 1246 | GCGGCCACGUAUCAUCGGC | 3297 | GCCGAUGAUACGUGGCCGC |
| siRNA 1247 | 1247 | CGGCCACGUAUCAUCGGCG | 3298 | CGCCGAUGAUACGUGGCCG |
| siRNA 1248 | 1248 | GGCCACGUAUCAUCGGCGG | 3299 | CCGCCGAUGAUACGUGGCC |
| siRNA 1249 | 1249 | GCCACGUAUCAUCGGCGGC | 3300 | GCCGCCGAUGAUACGUGGC |
| siRNA 1274 | 1274 | UCGCUGCCCGGCUCGCACC | 3325 | GGUGCGAGCCGGGCAGCGA |
| siRNA 1299 | 1299 | UGGCCGCCAUCUACAUCGG | 3350 | CCGAUGUAGAUGGCGGCCA |
| siRNA 1312 | 1312 | CAUCGGGGACAGCUUCUGC | 3363 | GCAGAAGCUGUCCCCGAUG |
| siRNA 1319 | 1319 | GACAGCUUCUGCGCCGGGA | 3370 | UCCCGGCGCAGAAGCUGUC |
| siRNA 1389 | 1389 | GCCCCCCCAGGGACAGCGU | 3440 | ACGCUGUCCCUGGGGGGGC |
| siRNA 1390 | 1390 | CCCCCCCAGGGACAGCGUC | 3441 | GACGCUGUCCCUGGGGGGG |
| siRNA 1392 | 1392 | CCCCCAGGGACAGCGUCUC | 3443 | GAGACGCUGUCCCUGGGGG |
| siRNA 1424 | 1424 | CAGCACUUCUUCAACCGCA | 3475 | UGCGGUUGAAGAAGUGCUG |
| siRNA 1427 | 1427 | CACUUCUUCAACCGCACGA | 3478 | UCGUGCGGUUGAAGAAGUG |
| siRNA 1430 | 1430 | UUCUUCAACCGCACGACGG | 3481 | CCGUCGUGCGGUUGAAGAA |
| siRNA 1432 | 1432 | CUUCAACCGCACGACGGAC | 3483 | GUCCGUCGUGCGGUUGAAG |
| siRNA 1433 | 1433 | UUCAACCGCACGACGGACG | 3484 | CGUCCGUCGUGCGGUUGAA |
| siRNA 1434 | 1434 | UCAACCGCACGACGGACGU | 3485 | ACGUCCGUCGUGCGGUUGA |
| siRNA 1435 | 1435 | CAACCGCACGACGGACGUG | 3486 | CACGUCCGUCGUGCGGUUG |
| siRNA 1438 | 1438 | CCGCACGACGGACGUGACG | 3489 | CGUCACGUCCGUCGUGCGG |
| siRNA 1439 | 1439 | CGCACGACGGACGUGACGC | 3490 | GCGUCACGUCCGUCGUGCG |
| siRNA 1440 | 1440 | GCACGACGGACGUGACGCA | 3491 | UGCGUCACGUCCGUCGUGC |
| siRNA 1441 | 1441 | CACGACGGACGUGACGCAG | 3492 | CUGCGUCACGUCCGUCGUG |
| siRNA 1443 | 1443 | CGACGGACGUGACGCAGAC | 3494 | GUCUGCGUCACGUCCGUCG |
| siRNA 1446 | 1446 | CGGACGUGACGCAGACCUU | 3497 | AAGGUCUGCGUCACGUCCG |
| siRNA 1449 | 1449 | ACGUGACGCAGACCUUCGG | 3500 | CCGAAGGUCUGCGUCACGU |
| siRNA 1452 | 1452 | UGACGCAGACCUUCGGCAU | 3503 | AUGCCGAAGGUCUGCGUCA |
| siRNA 1453 | 1453 | GACGCAGACCUUCGGCAUC | 3504 | GAUGCCGAAGGUCUGCGUC |
| siRNA 1456 | 1456 | GCAGACCUUCGGCAUCGAG | 3507 | CUCGAUGCCGAAGGUCUGC |
| siRNA 1459 | 1459 | GACCUUCGGCAUCGAGAAG | 3510 | CUUCUCGAUGCCGAAGGUC |
| siRNA 1463 | 1463 | UUCGGCAUCGAGAAGUACA | 3514 | UGUACUUCUCGAUGCCGAA |
| siRNA 1469 | 1469 | AUCGAGAAGUACAUCCCGU | 3520 | ACGGGAUGUACUUCUCGAU |
| siRNA 1475 | 1475 | AAGUACAUCCCGUACACCC | 3526 | GGGUGUACGGGAUGUACUU |
| siRNA 1477 | 1477 | GUACAUCCCGUACACCCUG | 3528 | CAGGGUGUACGGGAUGUAC |
| siRNA 1504 | 1504 | GUUCAACCCCAGCGACCAC | 3555 | GUGGUCGCUGGGGUUGAAC |
| siRNA 1506 | 1506 | UCAACCCCAGCGACCACGA | 3557 | UCGUGGUCGCUGGGGUUGA |
| siRNA 1509 | 1509 | ACCCCAGCGACCACGACCU | 3560 | AGGUCGUGGUCGCUGGGGU |
| siRNA 1512 | 1512 | CCAGCGACCACGACCUCGU | 3563 | ACGAGGUCGUGGUCGCUGG |
| siRNA 1516 | 1516 | CGACCACGACCUCGUCCUG | 3567 | CAGGACGAGGUCGUGGUCG |
| siRNA 1518 | 1518 | ACCACGACCUCGUCCUGAU | 3569 | AUCAGGACGAGGUCGUGGU |
| siRNA 1519 | 1519 | CCACGACCUCGUCCUGAUC | 3570 | GAUCAGGACGAGGUCGUGG |
| siRNA 1521 | 1521 | ACGACCUCGUCCUGAUCCG | 3572 | CGGAUCAGGACGAGGUCGU |
| siRNA 1523 | 1523 | GACCUCGUCCUGAUCCGGC | 3574 | GCCGGAUCAGGACGAGGUC |
| siRNA 1524 | 1524 | ACCUCGUCCUGAUCCGGCU | 3575 | AGCCGGAUCAGGACGAGGU |
| siRNA 1528 | 1528 | CGUCCUGAUCCGGCUGAAG | 3579 | CUUCAGCCGGAUCAGGACG |
| siRNA 1564 | 1564 | UGCCACACGCUCGCAGUUC | 3615 | GAACUGCGAGCGUGUGGCA |
| siRNA 1565 | 1565 | GCCACACGCUCGCAGUUCG | 3616 | CGAACUGCGAGCGUGUGGC |
| siRNA 1566 | 1566 | CCACACGCUCGCAGUUCGU | 3617 | ACGAACUGCGAGCGUGUGG |
| siRNA 1567 | 1567 | CACACGCUCGCAGUUCGUG | 3618 | CACGAACUGCGAGCGUGUG |
| siRNA 1568 | 1568 | ACACGCUCGCAGUUCGUGC | 3619 | GCACGAACUGCGAGCGUGU |
| siRNA 1623 | 1623 | CCGCAGGACACAAGUGCCA | 3674 | UGGCACUUGUGUCCUGCGG |
| siRNA 1663 | 1663 | GGAUGAGAACGUGAGCGGC | 3714 | GCCGCUCACGUUCUCAUCC |
| siRNA 1672 | 1672 | CGUGAGCGGCUACUCCAGC | 3723 | GCUGGAGUAGCCGCUCACG |
| siRNA 1709 | 1709 | GUCCCCCUGGUCGCCGACC | 3760 | GGUCGGCGACCAGGGGGAC |
| siRNA 1713 | 1713 | CCCUGGUCGCCGACCACAA | 3764 | UUGUGGUCGGCGACCAGGG |
| siRNA 1718 | 1718 | GUCGCCGACCACAAGUGCA | 3769 | UGCACUUGUGGUCGGCGAC |
| siRNA 1722 | 1722 | CCGACCACAAGUGCAGCAG | 3773 | CUGCUGCACUUGUGGUCGG |
| sIRNA 1743 | 1743 | CUGAGGUCUACGGCGCCGA | 3794 | UCGGCGCCGUAGACCUCAG |
| siRNA 1745 | 1745 | GAGGUCUACGGCGCCGACA | 3796 | UGUCGGCGCCGUAGACCUC |
| siRNA 1749 | 1749 | UCUACGGCGCCGACAUCAG | 3800 | CUGAUGUCGGCGCCGUAGA |
| siRNA 1752 | 1752 | ACGGCGCCGACAUCAGCCC | 3803 | GGGCUGAUGUCGGCGCCGU |
| siRNA 1770 | 1770 | CCAACAUGCUCUGUGCCGG | 3821 | CCGGCACAGAGCAUGUUGG |
| siRNA 1781 | 1781 | UGUGCCGGCUACUUCGACU | 3832 | AGUCGAAGUAGCCGGCACA |
| siRNA 1782 | 1782 | GUGCCGGCUACUUCGACUG | 3833 | CAGUCGAAGUAGCCGGCAC |
| siRNA 1783 | 1783 | UGCCGGCUACUUCGACUGC | 3834 | GCAGUCGAAGUAGCCGGCA |
| siRNA 1785 | 1785 | CCGGCUACUUCGACUGCAA | 3836 | UUGCAGUCGAAGUAGCCGG |
| siRNA 1791 | 1791 | ACUUCGACUGCAAGUCCGA | 3842 | UCGGACUUGCAGUCGAAGU |
| siRNA 1792 | 1792 | CUUCGACUGCAAGUCCGAC | 3843 | GUCGGACUUGCAGUCGAAG |
| siRNA 1793 | 1793 | UUCGACUGCAAGUCCGACG | 3844 | CGUCGGACUUGCAGUCGAA |
| siRNA 1794 | 1794 | UCGACUGCAAGUCCGACGC | 3845 | GCGUCGGACUUGCAGUCGA |
| siRNA 1799 | 1799 | UGCAAGUCCGACGCCUGCC | 3850 | GGCAGGCGUCGGACUUGCA |
| siRNA 1850 | 1850 | AAGAACGGCGUGGCUUACC | 3901 | GGUAAGCCACGCCGUUCUU |
| siRNA 1851 | 1851 | AGAACGGCGUGGCUUACCU | 3902 | AGGUAAGCCACGCCGUUCU |
| siRNA 1858 | 1858 | CGUGGCUUACCUCUACGGC | 3909 | GCCGUAGAGGUAAGCCACG |
| siRNA 1859 | 1859 | GUGGCUUACCUCUACGGCA | 3910 | UGCCGUAGAGGUAAGCCAC |
| siRNA 1860 | 1860 | UGGCUUACCUCUACGGCAU | 3911 | AUGCCGUAGAGGUAAGCCA |
| siRNA 1861 | 1861 | GGCUUACCUCUACGGCAUC | 3912 | GAUGCCGUAGAGGUAAGCC |
| siRNA 1862 | 1862 | GCUUACCUCUACGGCAUCA | 3913 | UGAUGCCGUAGAGGUAAGC |
| siRNA 1863 | 1863 | CUUACCUCUACGGCAUCAU | 3914 | AUGAUGCCGUAGAGGUAAG |
| siRNA 1897 | 1897 | CUGCGGGCGGCUCCACAAG | 3948 | CUUGUGGAGCCGCCCGCAG |
| siRNA 1900 | 1900 | CGGGCGGCUCCACAAGCCG | 3951 | CGGCUUGUGGAGCCGCCCG |
| siRNA 1902 | 1902 | GGCGGCUCCACAAGCCGGG | 3953 | CCCGGCUUGUGGAGCCGCC |
| siRNA 1908 | 1908 | UCCACAAGCCGGGGGUCUA | 3959 | UAGACCCCCGGCUUGUGGA |
| siRNA 1910 | 1910 | CACAAGCCGGGGGUCUACA | 3961 | UGUAGACCCCCGGCUUGUG |
| siRNA 1927 | 1927 | CACCCGCGUGGCCAACUAU | 3978 | AUAGUUGGCCACGCGGGUG |
| siRNA 1929 | 1929 | CCCGCGUGGCCAACUAUGU | 3980 | ACAUAGUUGGCCACGCGGG |
| siRNA 1937 | 1937 | GCCAACUAUGUGGACUGGA | 3988 | UCCAGUCCACAUAGUUGGC |
| siRNA 2010 | 2010 | GCGGGACACCCUGGUUCCC | 4061 | GGGAACCAGGGUGUCCCGC |

[0273] Therapeutic siRNAs were designed to target human HGFAC as described above and, in some cases, the HGFAC sequence of at least one toxicology-relevant species, in this case, the non-human primate (NHP) cynomolgus monkey. The siRNAs included in subset E had the following characteristics: Cross-reactivity: With 19mer in human HGFAC mRNA, with 17mer/19mer in NHP HGFAC; Specificity category: For human and NHP: AS2 or better, SS3 or better; miRNA seeds: AS+SS strand: seed region not conserved in human, mouse, and rat and not present in >4 species; Off-target frequency: ≤20 human off-targets matched with 2 mismatches in antisense strand; and SNPs: siRNA target sites do not harbor SNPs with a MAF≥1% (pos. 2-18).

[0274] Subset E includes 26 siRNAs.

TABLE E
Subset E, Screening Set

| | | sense | | antisense |
|---|---|---|---|---|
| | SEQ | strand | SEQ | strand |
| | ID | sequence | ID | sequence |
| siRNA NO: | NO: | (5′-3′) | NO: | (5′-3′) |
| siRNA 160 | 160 | GGAGUCCCCAGA | 2211 | AUUAGGUUCUGG |
| | | ACCUAAU | | GGACUCC |
| siRNA 166 | 166 | CCCAGAACCUAA | 2217 | UGUGGCAUUAGG |
| | | UGCCACA | | UUCUGGG |
| siRNA 202 | 202 | CACUAUCCUGGU | 2253 | AGAGGUCACCAG |
| | | GACCUCU | | GAUAGUG |
| siRNA 203 | 203 | ACUAUCCUGGUG | 2254 | CAGAGGUCACCA |
| | | ACCUCUG | | GGAUAGU |
| siRNA 431 | 431 | UGUGCCACAACU | 2482 | AGUUGUGAGUUG |
| | | CACAACU | | UGGCACA |
| siRNA 434 | 434 | GCCACAACUCAC | 2485 | CGUAGUUGUGAG |
| | | AACUACG | | UUGUGGC |
| siRNA 436 | 436 | CACAACUCACAA | 2487 | GUCGUAGUUGUG |
| | | CUACGAC | | AGUUGUG |
| siRNA 437 | 437 | ACAACUCACAAC | 2488 | GGUCGUAGUUGU |
| | | UACGACC | | GAGUUGU |
| siRNA 438 | 438 | CAACUCACAACU | 2489 | CGGUCGUAGUUG |
| | | ACGACCG | | UGAGUUG |
| siRNA 751 | 751 | CACCCGACAUAC | 2802 | ACAAGCUGUAUG |
| | | AGCUUGU | | UCGGGUG |
| siRNA 879 | 879 | CUGAUGAGCGCU | 2930 | AAGAAGCAGCGC |
| | | GCUUCUU | | UCAUCAG |
| siRNA | 1424 | CAGCACUUCUUC | 3475 | UGCGGUUGAAGA |
| 1424 | | AACCGCA | | AGUGCUG |
| siRNA | 1428 | ACUUCUUCAACC | 3479 | GUCGUGCGGUUG |
| 1428 | | GCACGAC | | AAGAAGU |
| siRNA | 1460 | ACCUUCGGCAUC | 3511 | ACUUCUCGAUGC |
| 1460 | | GAGAAGU | | CGAAGGU |
| siRNA | 1463 | UUCGGCAUCGAG | 3514 | UGUACUUCUCGA |
| 1463 | | AAGUACA | | UGCCGAA |
| siRNA | 1464 | UCGGCAUCGAGA | 3515 | AUGUACUUCUCG |
| 1464 | | AGUACAU | | AUGCCGA |
| siRNA | 1469 | AUCGAGAAGUAC | 3520 | ACGGGAUGUACU |
| 1469 | | AUCCCGU | | UCUCGAU |
| siRNA | 1470 | UCGAGAAGUACA | 3521 | UACGGGAUGUAC |
| 1470 | | UCCCGUA | | UUCUCGA |
| siRNA | 1471 | CGAGAAGUACAU | 3522 | GUACGGGAUGUA |
| 1471 | | CCCGUAC | | CUUCUCG |
| siRNA | 1474 | GAAGUACAUCCC | 3525 | GGUGUACGGGAU |
| 1474 | | GUACACC | | GUACUUC |
| siRNA | 1628 | GGACACAAGUGC | 3679 | CAAUCUGGCACU |
| 1628 | | CAGAUUG | | UGUGUCC |
| siRNA | 1630 | ACACAAGUGCCA | 3681 | CGCAAUCUGGCA |
| 1630 | | GAUUGCG | | CUUGUGU |
| siRNA | 1788 | GCUACUUCGACU | 3839 | GACUUGCAGUCG |
| 1788 | | GCAAGUC | | AAGUAGC |
| siRNA | 1789 | CUACUUCGACUG | 3840 | GGACUUGCAGUC |
| 1789 | | CAAGUCC | | GAAGUAG |
| siRNA | 1791 | ACUUCGACUGCA | 3842 | UCGGACUUGCAG |
| 1791 | | AGUCCGA | | UCGAAGU |
| siRNA | 1864 | UUACCUCUACGG | 3915 | GAUGAUGCCGUA |
| 1864 | | CAUCAUC | | GAGGUAA |

[0275] In some cases, the sense strand of any of the siRNAs of subset E comprises siRNA with a particular modification pattern. In this modification pattern, position 9 counting from the 5′ end of the of the sense strand is has the 2′F modification. If position 9 of the sense strand is a pyrimidine, then all purines in the sense strand have the 2′OMe modification. If position 9 is the only pyrimidine between positions 5 and 11 of the sense stand, then position 9 is the only position with the 2′F modification in the sense strand. If position 9 and only one other base between positions 5 and 11 of the sense strand are pyrimidines, then both of these pyrimidines are the only two positions with the 2′F modification in the sense strand. If position 9 and only two other bases between positions 5 and 11 of the sense strand are pyrimidines, and those two other pyrimidines are in adjacent positions so that there would be not three 2′F modifications in a row, then any combination of 2′F modifications can be made that give three 2′F modifications in total. If there are >2 pyrimidines between positions 5 and 11 of the sense strand, then all combinations of pyrimidines having the 2′F modification are allowed that have three to five 2′F modifications in total, provided that the sense strand does not have three 2′F modifications in a row. If position 9 of the sense strand is a purine, then all purines in the sense strand have the 2′OMe modification. If position 9 is the only purine between positions 5 and 11 of the sense stand, then position 9 is the only position with the 2′F modification in the sense strand. If position 9 and only one other base between positions 5 and 11 of the sense strand are purines, then both of these purines are the only two positions with the 2′F modification in the sense strand. If position 9 and only two other bases between positions 5 and 11 of the sense strand are purines, and those two other purines are in adjacent positions so that there would be not three 2′F modifications in a row, then any combination of 2′F modifications can be made that give three 2′F modifications in total. If there are >2 purines between positions 5 and 11 of the sense strand, then all combinations of purines having the 2′F modification are allowed that have three to five 2′F modifications in total, provided that the sense strand does not have three 2′F modifications in a row.

[0276] In some cases, the sense strand of any of the siRNAs of subset E comprises a modification pattern which conforms to these sense strand rules (see, e.g., Table F).

[0277] In some cases, the antisense strand of any of the siRNAs of subset E comprise a modification or modification pattern. Some such examples are included in Table F. Table F(1) includes some additional details of the siRNAs in Table F. The modification pattern may include modification pattern 3AS. The siRNAs in subset E may comprise any other modification pattern(s).

TABLE F
Subset F, Mod Screening Set

| | SEQ ID | | SEQ ID | |
|---|---|---|---|---|
| siRNA name | NO: | sense strand sequence (5′-3′) | NO: | antisense strand sequence (5′-3′) |
| siRNA4103/4208 | 4103 | gsgsaguCfcCfCfagaaccuaaasusu | 4208 | usUfsuAfgGfuUfcUfgGfgGfaCfuCfcsusu |
| siRNA4104/4208 | 4104 | gsgsaguCfCfcCfagaaccuaaasusu | 4208 | usUfsuAfgGfuUfcUfgGfgGfaCfuCfcsusu |
| siRNA4105/4208 | 4105 | gsgsaguCfCfCfCfagaaccuaaasusu | 4208 | usUfsuAfgGfuUfcUfgGfgGfaCfuCfcsusu |
| siRNA4106/4208 | 4106 | gsgsagUfccCfCfagaaccuaaasusu | 4208 | usUfsuAfgGfuUfcUfgGfgGfaCfuCfcsusu |
| siRNA4107/4208 | 4107 | gsgsagUfcCfcCfagaaccuaaasusu | 4208 | usUfsuAfgGfuUfcUfgGfgGfaCfuCfcsusu |
| siRNA4108/4208 | 4108 | gsgsagUfCfccCfagaaccuaaasusu | 4208 | usUfsuAfgGfuUfcUfgGfgGfaCfuCfcsusu |
| siRNA4109/4208 | 4109 | gsgsagUfCfcCfCfagaaccuaaasusu | 4208 | usUfsuAfgGfuUfcUfgGfgGfaCfuCfcsusu |
| siRNA4110/4208 | 4110 | gsgsagUfCfCfCfCfagaaccuaaasusu | 4208 | usUfsuAfgGfuUfcUfgGfgGfaCfuCfcsusu |
| siRNA4111/4209 | 4111 | cscscagaacCfUfaaugccacasusu | 4209 | usGfsuGfgCfaUfuAfgGfuUfcUfgGfgsusu |
| siRNA4112/4209 | 4112 | cscscagaaCfCfuaaugccacasusu | 4209 | usGfsuGfgCfaUfuAfgGfuUfcUfgGfgsusu |
| siRNA4113/4210 | 4113 | csascuaUfcCfUfggugaccucasusu | 4210 | usGfsaGfgUfcAfcCfaGfgAfuAfgUfgsusu |
| siRNA4114/4210 | 4114 | csascuaUfCfcUfggugaccucasusu | 4210 | usGfsaGfgUfcAfcCfaGfgAfuAfgUfgsusu |
| siRNA4115/4210 | 4115 | csascuaUfCfCfUfggugaccucasusu | 4210 | usGfsaGfgUfcAfcCfaGfgAfuAfgUfgsusu |
| siRNA4116/4211 | 4116 | ascsuauccuGfGfugaccucuasusu | 4211 | usAfsgAfgGfuCfaCfcAfgGfaUfaGfususu |
| siRNA4117/4212 | 4117 | usgsugccAfcAfAfcucacaacasusu | 4212 | usGfsuUfgUfgAfgUfuGfuGfgCfaCfasusu |
| siRNA4118/4213 | 4118 | gscscaCfaacUfCfacaacuacasusu | 4213 | usGfsuAfgUfuGfuGfaGfuUfgUfgGfcsusu |
| siRNA4119/4213 | 4119 | gscscaCfaaCfUfcacaacuacasusu | 4213 | usGfsuAfgUfuGfuGfaGfuUfgUfgGfcsusu |
| siRNA4120/4214 | 4120 | csascaAfcucAfcAfacuacgaasusu | 4214 | usUfscGfuAfgUfuGfuGfaGfuUfgUfgsusu |
| siRNA4121/4215 | 4121 | ascsaacUfCfaCfaacuacgacasusu | 4215 | usGfsuCfgUfaGfuUfgUfgAfgUfuGfususu |
| siRNA4122/4215 | 4122 | ascsaaCfuCfaCfaacuacgacasusu | 4215 | usGfsuCfgUfaGfuUfgUfgAfgUfuGfususu |
| siRNA4123/4215 | 4123 | ascsaaCfUfcaCfaacuacgacasusu | 4215 | usGfsuCfgUfaGfuUfgUfgAfgUfuGfususu |
| siRNA4124/4216 | 4124 | csasacucAfcAfAfcuacgaccasusu | 4216 | usGfsgUfcGfuAfgUfuGfuGfaGfuUfgsusu |
| siRNA4125/4217 | 4125 | csascccgAfcAfuAfcagcuugasusu | 4217 | usCfsaAfgCfuGfuAfuGfuCfgGfgUfgsusu |
| siRNA4126/4217 | 4126 | csascccGfacAfuAfcagcuugasusu | 4217 | usCfsaAfgCfuGfuAfuGfuCfgGfgUfgsusu |
| siRNA4127/4217 | 4127 | csascccGfAfcAfuacagcuugasusu | 4217 | usCfsaAfgCfuGfuAfuGfuCfgGfgUfgsusu |
| siRNA4128/4217 | 4128 | csascccGfAfcAfuAfcagcuugasusu | 4217 | usCfsaAfgCfuGfuAfuGfuCfgGfgUfgsusu |
| siRNA4129/4218 | 4129 | csusgaUfgagCfgCfugcuucuasusu | 4218 | usAfsgAfaGfcAfgCfgCfuCfaUfcAfgsusu |
| siRNA4130/4219 | 4130 | csasgcacuUfCfuUfcaaccgcasusu | 4219 | usGfscGfgUfuGfaAfgAfaGfuGfcUfgsusu |
| siRNA4131/4219 | 4131 | csasgcacuUfCfUfUfcaaccgcasusu | 4219 | usGfscGfgUfuGfaAfgAfaGfuGfcUfgsusu |
| siRNA4132/4219 | 4132 | csasgcacUfuCfuUfcaaccgcasusu | 4219 | usGfscGfgUfuGfaAfgAfaGfuGfcUfgsusu |
| siRNA4133/4219 | 4133 | csasgcacUfuCfUfucaaccgcasusu | 4219 | usGfscGfgUfuGfaAfgAfaGfuGfcUfgsusu |
| siRNA4134/4219 | 4134 | csasgcacUfUfCfUfucaaccgcasusu | 4219 | usGfscGfgUfuGfaAfgAfaGfuGfcUfgsusu |
| siRNA4135/4219 | 4135 | csasgcacUfUfCfUfUfcaaccgcasusu | 4219 | usGfscGfgUfuGfaAfgAfaGfuGfcUfgsusu |
| siRNA4136/4219 | 4136 | csasgcaCfuuCfuUfcaaccgcasusu | 4219 | usGfscGfgUfuGfaAfgAfaGfuGfcUfgsusu |
| siRNA4137/4219 | 4137 | csasgcaCfuuCfUfucaaccgcasusu | 4219 | usGfscGfgUfuGfaAfgAfaGfuGfcUfgsusu |
| siRNA4138/4219 | 4138 | csasgcaCfuUfCfuucaaccgcasusu | 4219 | usGfscGfgUfuGfaAfgAfaGfuGfcUfgsusu |
| siRNA4139/4219 | 4139 | csasgcaCfuUfCfuUfcaaccgcasusu | 4219 | usGfscGfgUfuGfaAfgAfaGfuGfcUfgsusu |
| siRNA4140/4219 | 4140 | csasgcaCfuUfCfUfUfcaaccgcasusu | 4219 | usGfscGfgUfuGfaAfgAfaGfuGfcUfgsusu |
| siRNA4141/4219 | 4141 | csasgcaCfUfuCfuucaaccgcasusu | 4219 | usGfscGfgUfuGfaAfgAfaGfuGfcUfgsusu |
| siRNA4142/4219 | 4142 | csasgcaCfUfuCfuUfcaaccgcasusu | 4219 | usGfscGfgUfuGfaAfgAfaGfuGfcUfgsusu |
| siRNA4143/4219 | 4143 | csasgcaCfUfuCfUfucaaccgcasusu | 4219 | usGfscGfgUfuGfaAfgAfaGfuGfcUfgsusu |
| siRNA4144/4219 | 4144 | csasgcaCfUfUfCfuucaaccgcasusu | 4219 | usGfscGfgUfuGfaAfgAfaGfuGfcUfgsusu |
| siRNA4145/4219 | 4145 | csasgcaCfUfUfCfuUfcaaccgcasusu | 4219 | usGfscGfgUfuGfaAfgAfaGfuGfcUfgsusu |
| siRNA4146/4219 | 4146 | csasgcaCfUfUfCfUfucaaccgcasusu | 4219 | usGfscGfgUfuGfaAfgAfaGfuGfcUfgsusu |
| siRNA4147/4220 | 4147 | ascsuucuucAfAfccgcacgaasusu | 4220 | usUfscGfuGfcGfgUfuGfaAfgAfaGfususu |
| siRNA4148/4221 | 4148 | ascscuuCfggCfaUfcgagaagasusu | 4221 | usCfsuUfcUfcGfaUfgCfcGfaAfgGfususu |
| siRNA4149/4221 | 4149 | ascscuUfcggCfaUfcgagaagasusu | 4221 | usCfsuUfcUfcGfaUfgCfcGfaAfgGfususu |
| siRNA4150/4221 | 4150 | ascscuUfCfggCfaucgagaagasusu | 4221 | usCfsuUfcUfcGfaUfgCfcGfaAfgGfususu |
| siRNA4151/4221 | 4151 | ascscuUfCfggCfaUfcgagaagasusu | 4221 | usCfsuUfcUfcGfaUfgCfcGfaAfgGfususu |
| siRNA4152/4222 | 4152 | ususcggCfaUfCfgagaaguacasusu | 4222 | usGfsuAfcUfuCfuCfgAfuGfcCfgAfasusu |
| siRNA4153/4223 | 4153 | uscsggcAfucGfaGfaaguacaasusu | 4223 | usUfsgUfaCfuUfcUfcGfaUfgCfcGfasusu |
| siRNA4154/4223 | 4154 | uscsggcAfucGfAfgaaguacaasusu | 4223 | usUfsgUfaCfuUfcUfcGfaUfgCfcGfasusu |
| siRNA4155/4224 | 4155 | asuscgagaAfGfuAfcaucccgasusu | 4224 | usCfsgGfgAfuGfuAfcUfuCfuCfgAfususu |
| siRNA4156/4224 | 4156 | asuscgagAfaGfuAfcaucccgasusu | 4224 | usCfsgGfgAfuGfuAfcUfuCfuCfgAfususu |
| siRNA4157/4224 | 4157 | asuscgaGfaaGfuAfcaucccgasusu | 4224 | usCfsgGfgAfuGfuAfcUfuCfuCfgAfususu |
| siRNA4158/4224 | 4158 | asuscgaGfaAfGfuacaucccgasusu | 4224 | usCfsgGfgAfuGfuAfcUfuCfuCfgAfususu |
| siRNA4159/4224 | 4159 | asuscgaGfaAfGfuAfcaucccgasusu | 4224 | usCfsgGfgAfuGfuAfcUfuCfuCfgAfususu |
| siRNA4160/4224 | 4160 | asuscgaGfAfaGfuacaucccgasusu | 4224 | usCfsgGfgAfuGfuAfcUfuCfuCfgAfususu |
| siRNA4161/4224 | 4161 | asuscgaGfAfaGfuAfcaucccgasusu | 4224 | usCfsgGfgAfuGfuAfcUfuCfuCfgAfususu |
| siRNA4162/4224 | 4162 | asuscgaGfAfAfGfuacaucccgasusu | 4224 | usCfsgGfgAfuGfuAfcUfuCfuCfgAfususu |
| siRNA4163/4224 | 4163 | asuscgaGfAfAfGfuAfcaucccgasusu | 4224 | usCfsgGfgAfuGfuAfcUfuCfuCfgAfususu |
| siRNA4164/4224 | 4164 | asuscgAfgaaGfuAfcaucccgasusu | 4224 | usCfsgGfgAfuGfuAfcUfuCfuCfgAfususu |
| siRNA4165/4224 | 4165 | asuscgAfgaAfGfuacaucccgasusu | 4224 | usCfsgGfgAfuGfuAfcUfuCfuCfgAfususu |
| siRNA4166/4224 | 4166 | asuscgAfgaAfGfuAfcaucccgasusu | 4224 | usCfsgGfgAfuGfuAfcUfuCfuCfgAfususu |
| siRNA4167/4224 | 4167 | asuscgAfgAfaGfuacaucccgasusu | 4224 | usCfsgGfgAfuGfuAfcUfuCfuCfgAfususu |
| siRNA4168/4224 | 4168 | asuscgAfgAfaGfuAfcaucccgasusu | 4224 | usCfsgGfgAfuGfuAfcUfuCfuCfgAfususu |
| siRNA4169/4224 | 4169 | asuscgAfGfaaGfuacaucccgasusu | 4224 | usCfsgGfgAfuGfuAfcUfuCfuCfgAfususu |
| siRNA4170/4224 | 4170 | asuscgAfGfaaGfuAfcaucccgasusu | 4224 | usCfsgGfgAfuGfuAfcUfuCfuCfgAfususu |
| siRNA4171/4224 | 4171 | asuscgAfGfaAfGfuacaucccgasusu | 4224 | usCfsgGfgAfuGfuAfcUfuCfuCfgAfususu |
| siRNA4172/4224 | 4172 | asuscgAfGfaAfGfuAfcaucccgasusu | 4224 | usCfsgGfgAfuGfuAfcUfuCfuCfgAfususu |
| siRNA4173/4224 | 4173 | asuscgAfGfAfAfGfuacaucccgasusu | 4224 | usCfsgGfgAfuGfuAfcUfuCfuCfgAfususu |
| siRNA4174/4225 | 4174 | uscsgagaagUfaCfaucccguasusu | 4225 | usAfscGfgGfaUfgUfaCfuUfcUfcGfasusu |
| siRNA4175/4226 | 4175 | csgsagaaGfuAfcAfucccguaasusu | 4226 | usUfsaCfgGfgAfuGfuAfcUfuCfuCfgsusu |
| siRNA4176/4226 | 4176 | csgsagaAfguAfcAfucccguaasusu | 4226 | usUfsaCfgGfgAfuGfuAfcUfuCfuCfgsusu |
| siRNA4177/4226 | 4177 | csgsagaAfGfuAfcaucccguaasusu | 4226 | usUfsaCfgGfgAfuGfuAfcUfuCfuCfgsusu |
| siRNA4178/4226 | 4178 | csgsagaAfGfuAfcAfucccguaasusu | 4226 | usUfsaCfgGfgAfuGfuAfcUfuCfuCfgsusu |
| siRNA4179/4226 | 4179 | csgsagAfaguAfcAfucccguaasusu | 4226 | usUfsaCfgGfgAfuGfuAfcUfuCfuCfgsusu |
| siRNA4180/4226 | 4180 | csgsagAfaGfuAfcaucccguaasusu | 4226 | usUfsaCfgGfgAfuGfuAfcUfuCfuCfgsusu |
| siRNA4181/4226 | 4181 | csgsagAfaGfuAfcAfucccguaasusu | 4226 | usUfsaCfgGfgAfuGfuAfcUfuCfuCfgsusu |
| siRNA4182/4226 | 4182 | csgsagAfAfguAfcaucccguaasusu | 4226 | usUfsaCfgGfgAfuGfuAfcUfuCfuCfgsusu |
| siRNA4183/4226 | 4183 | csgsagAfAfguAfcAfucccguaasusu | 4226 | usUfsaCfgGfgAfuGfuAfcUfuCfuCfgsusu |
| siRNA4184/4227 | 4184 | gsasaguaCfaUfcCfcguacacasusu | 4227 | usGfsuGfuAfcGfgGfaUfgUfaCfuUfcsusu |
| siRNA4185/4227 | 4185 | gsasaguaCfaUfCfccguacacasusu | 4227 | usGfsuGfuAfcGfgGfaUfgUfaCfuUfcsusu |
| siRNA4186/4227 | 4186 | gsasagUfacaUfcCfcguacacasusu | 4227 | usGfsuGfuAfcGfgGfaUfgUfaCfuUfcsusu |
| siRNA4187/4227 | 4187 | gsasagUfacaUfCfccguacacasusu | 4227 | usGfsuGfuAfcGfgGfaUfgUfaCfuUfcsusu |
| siRNA4188/4227 | 4188 | gsasagUfaCfaUfcccguacacasusu | 4227 | usGfsuGfuAfcGfgGfaUfgUfaCfuUfcsusu |
| siRNA4189/4227 | 4189 | gsasagUfaCfaUfcCfcguacacasusu | 4227 | usGfsuGfuAfcGfgGfaUfgUfaCfuUfcsusu |
| siRNA4190/4227 | 4190 | gsasagUfaCfaUfCfccguacacasusu | 4227 | usGfsuGfuAfcGfgGfaUfgUfaCfuUfcsusu |
| siRNA4191/4228 | 4191 | gsgsacacaAfGfuGfccagauuasusu | 4228 | usAfsaUfcUfgGfcAfcUfuGfuGfuCfcsusu |
| siRNA4192/4228 | 4192 | gsgsacacAfaGfuGfccagauuasusu | 4228 | usAfsaUfcUfgGfcAfcUfuGfuGfuCfcsusu |
| siRNA4193/4228 | 4193 | gsgsacAfcaaGfuGfccagauuasusu | 4228 | usAfsaUfcUfgGfcAfcUfuGfuGfuCfcsusu |
| siRNA4194/4228 | 4194 | gsgsacAfcaAfGfugccagauuasusu | 4228 | usAfsaUfcUfgGfcAfcUfuGfuGfuCfcsusu |
| siRNA4195/4228 | 4195 | gsgsacAfcaAfGfuGfccagauuasusu | 4228 | usAfsaUfcUfgGfcAfcUfuGfuGfuCfcsusu |
| siRNA4196/4228 | 4196 | gsgsacAfcAfaGfugccagauuasusu | 4228 | usAfsaUfcUfgGfcAfcUfuGfuGfuCfcsusu |
| siRNA4197/4228 | 4197 | gsgsacAfcAfaGfuGfccagauuasusu | 4228 | usAfsaUfcUfgGfcAfcUfuGfuGfuCfcsusu |
| siRNA4198/4229 | 4198 | ascsacaAfGfuGfccagauugcasusu | 4229 | usGfscAfaUfcUfgGfcAfcUfuGfuGfususu |
| siRNA4199/4229 | 4199 | ascsacAfaGfuGfccagauugcasusu | 4229 | usGfscAfaUfcUfgGfcAfcUfuGfuGfususu |
| siRNA4200/4229 | 4200 | ascsacAfAfguGfccagauugcasusu | 4229 | usGfscAfaUfcUfgGfcAfcUfuGfuGfususu |
| siRNA4201/4230 | 4201 | gscsuacuucGfAfcugcaaguasusu | 4230 | usAfscUfuGfcAfgUfcGfaAfgUfaGfcsusu |
| siRNA4202/4231 | 4202 | csusacuucGfAfcugcaagucasusu | 4231 | usGfsaCfuUfgCfaGfuCfgAfaGfuAfgsusu |
| siRNA4203/4232 | 4203 | ascsuucgaCfUfgCfaaguccgasusu | 4232 | usCfsgGfaCfuUfgCfaGfuCfgAfaGfususu |
| siRNA4204/4232 | 4204 | ascsuuCfgacUfgCfaaguccgasusu | 4232 | usCfsgGfaCfuUfgCfaGfuCfgAfaGfususu |
| siRNA4205/4232 | 4205 | ascsuuCfgaCfUfgcaaguccgasusu | 4232 | usCfsgGfaCfuUfgCfaGfuCfgAfaGfususu |
| siRNA4206/4232 | 4206 | ascsuuCfgaCfUfgCfaaguccgasusu | 4232 | usCfsgGfaCfuUfgCfaGfuCfgAfaGfususu |
| siRNA4207/4233 | 4207 | ususaccucuAfcGfgcaucauasusu | 4233 | usAfsuGfaUfgCfcGfuAfgAfgGfuAfasusu |
| siRNA4191/4228 | 4191 | gsgsacacaAfGfuGfccagauuasusu | 4228 | usAfsaUfcUfgGfcAfcUfuGfuGfuCfcsusu |
| siRNA4192/4228 | 4192 | gsgsacacAfaGfuGfccagauuasusu | 4228 | usAfsaUfcUfgGfcAfcUfuGfuGfuCfcsusu |
| siRNA4193/4228 | 4193 | gsgsacAfcaaGfuGfccagauuasusu | 4228 | usAfsaUfcUfgGfcAfcUfuGfuGfuCfcsusu |
| siRNA4194/4228 | 4194 | gsgsacAfcaAfGfugccagauuasusu | 4228 | usAfsaUfcUfgGfcAfcUfuGfuGfuCfcsusu |
| siRNA4195/4228 | 4195 | gsgsacAfcaAfGfuGfccagauuasusu | 4228 | usAfsaUfcUfgGfcAfcUfuGfuGfuCfcsusu |
| siRNA4196/4228 | 4196 | gsgsacAfcAfaGfugccagauuasusu | 4228 | usAfsaUfcUfgGfcAfcUfuGfuGfuCfcsusu |
| siRNA4197/4228 | 4197 | gsgsacAfcAfaGfuGfccagauuasusu | 4228 | usAfsaUfcUfgGfcAfcUfuGfuGfuCfcsusu |
| siRNA4198/4229 | 4198 | ascsacaAfGfuGfccagauugcasusu | 4229 | usGfscAfaUfcUfgGfcAfcUfuGfuGfususu |
| siRNA4199/4229 | 4199 | ascsacAfaGfuGfccagauugcasusu | 4229 | usGfscAfaUfcUfgGfcAfcUfuGfuGfususu |
| siRNA4200/4229 | 4200 | ascsacAfAfguGfccagauugcasusu | 4229 | usGfscAfaUfcUfgGfcAfcUfuGfuGfususu |
| siRNA4201/4230 | 4201 | gscsuacuucGfAfcugcaaguasusu | 4230 | usAfscUfuGfcAfgUfcGfaAfgUfaGfcsusu |
| siRNA4202/4231 | 4202 | csusacuucGfAfcugcaagucasusu | 4231 | usGfsaCfuUfgCfaGfuCfgAfaGfuAfgsusu |
| siRNA4203/4232 | 4203 | ascsuucgaCfUfgCfaaguccgasusu | 4232 | usCfsgGfaCfuUfgCfaGfuCfgAfaGfususu |
| siRNA4204/4232 | 4204 | ascsuuCfgacUfgCfaaguccgasusu | 4232 | usCfsgGfaCfuUfgCfaGfuCfgAfaGfususu |
| siRNA4205/4232 | 4205 | ascsuuCfgaCfUfgcaaguccgasusu | 4232 | usCfsgGfaCfuUfgCfaGfuCfgAfaGfususu |
| siRNA4206/4232 | 4206 | ascsuuCfgaCfUfgCfaaguccgasusu | 4232 | usCfsgGfaCfuUfgCfaGfuCfgAfaGfususu |
| siRNA4207/4233 | 4207 | ususaccucuAfcGfgcaucauasusu | 4233 | usAfsuGfaUfgCfcGfuAfgAfgGfuAfasusu |

TABLE F(2)
Subset F, Mod Screening Set with Parent SEQ ID NOS.

| siRNA name | Parent SEQ ID NO: | Parent SEQ ID NO: |
|---|---|---|
| siRNA4103/4208 | 160 | 2211 |
| siRNA4104/4208 | 160 | 2211 |
| siRNA4105/4208 | 160 | 2211 |
| siRNA4106/4208 | 160 | 2211 |
| siRNA4107/4208 | 160 | 2211 |
| siRNA4108/4208 | 160 | 2211 |
| siRNA4109/4208 | 160 | 2211 |
| siRNA4110/4208 | 160 | 2211 |
| siRNA4111/4209 | 166 | 2217 |
| siRNA4112/4209 | 166 | 2217 |
| siRNA4113/4210 | 202 | 2253 |
| siRNA4114/4210 | 202 | 2253 |
| siRNA4115/4210 | 202 | 2253 |
| siRNA4116/4211 | 203 | 2254 |
| siRNA4117/4212 | 431 | 2482 |
| siRNA4118/4213 | 434 | 2485 |
| siRNA4119/4213 | 434 | 2485 |
| siRNA4120/4214 | 436 | 2487 |
| siRNA4121/4215 | 437 | 2488 |
| siRNA4122/4215 | 437 | 2488 |
| siRNA4123/4215 | 437 | 2488 |
| siRNA4124/4216 | 438 | 2489 |
| siRNA4125/4217 | 751 | 2802 |
| siRNA4126/4217 | 751 | 2802 |
| siRNA4127/4217 | 751 | 2802 |
| siRNA4128/4217 | 751 | 2802 |
| siRNA4129/4218 | 879 | 2930 |
| siRNA4130/4219 | 1424 | 3475 |
| siRNA4131/4219 | 1424 | 3475 |
| siRNA4132/4219 | 1424 | 3475 |
| siRNA4133/4219 | 1424 | 3475 |
| siRNA4134/4219 | 1424 | 3475 |
| siRNA4135/4219 | 1424 | 3475 |
| siRNA4136/4219 | 1424 | 3475 |
| siRNA4137/4219 | 1424 | 3475 |
| siRNA4138/4219 | 1424 | 3475 |
| siRNA4139/4219 | 1424 | 3475 |
| siRNA4140/4219 | 1424 | 3475 |
| siRNA4141/4219 | 1424 | 3475 |
| siRNA4142/4219 | 1424 | 3475 |
| siRNA4143/4219 | 1424 | 3475 |
| siRNA4144/4219 | 1424 | 3475 |
| siRNA4145/4219 | 1424 | 3475 |
| siRNA4146/4219 | 1424 | 3475 |
| siRNA4147/4220 | 1428 | 3479 |
| siRNA4148/4221 | 1460 | 3511 |
| siRNA4149/4221 | 1460 | 3511 |
| siRNA4150/4221 | 1460 | 3511 |
| siRNA4151/4221 | 1460 | 3511 |
| siRNA4152/4222 | 1463 | 3514 |
| siRNA4153/4223 | 1464 | 3515 |
| siRNA4154/4223 | 1464 | 3515 |
| siRNA4155/4224 | 1469 | 3520 |
| siRNA4156/4224 | 1469 | 3520 |
| siRNA4157/4224 | 1469 | 3520 |
| siRNA4158/4224 | 1469 | 3520 |
| siRNA4159/4224 | 1469 | 3520 |
| siRNA4160/4224 | 1469 | 3520 |
| siRNA4161/4224 | 1469 | 3520 |
| siRNA4162/4224 | 1469 | 3520 |
| siRNA4163/4224 | 1469 | 3520 |
| siRNA4164/4224 | 1469 | 3520 |
| siRNA4165/4224 | 1469 | 3520 |
| siRNA4166/4224 | 1469 | 3520 |
| siRNA4167/4224 | 1469 | 3520 |
| siRNA4168/4224 | 1469 | 3520 |
| siRNA4169/4224 | 1469 | 3520 |
| siRNA4170/4224 | 1469 | 3520 |
| siRNA4171/4224 | 1469 | 3520 |
| siRNA4172/4224 | 1469 | 3520 |
| siRNA4173/4224 | 1469 | 3520 |
| siRNA4174/4225 | 1470 | 3521 |
| siRNA4175/4226 | 1471 | 3522 |
| siRNA4176/4226 | 1471 | 3522 |
| siRNA4177/4226 | 1471 | 3522 |
| siRNA4178/4226 | 1471 | 3522 |
| siRNA4179/4226 | 1471 | 3522 |
| siRNA4180/4226 | 1471 | 3522 |
| siRNA4181/4226 | 1471 | 3522 |
| siRNA4182/4226 | 1471 | 3522 |
| siRNA4183/4226 | 1471 | 3522 |
| siRNA4184/4227 | 1474 | 3525 |
| siRNA4185/4227 | 1474 | 3525 |
| siRNA4186/4227 | 1474 | 3525 |
| siRNA4187/4227 | 1474 | 3525 |
| siRNA4188/4227 | 1474 | 3525 |
| siRNA4189/4227 | 1474 | 3525 |
| siRNA4190/4227 | 1474 | 3525 |
| siRNA4191/4228 | 1628 | 3679 |
| siRNA4192/4228 | 1628 | 3679 |
| siRNA4193/4228 | 1628 | 3679 |
| siRNA4194/4228 | 1628 | 3679 |
| siRNA4195/4228 | 1628 | 3679 |
| siRNA4196/4228 | 1628 | 3679 |
| siRNA4197/4228 | 1628 | 3679 |
| siRNA4198/4229 | 1630 | 3681 |
| siRNA4199/4229 | 1630 | 3681 |
| siRNA4200/4229 | 1630 | 3681 |
| siRNA4201/4230 | 1788 | 3839 |
| siRNA4202/4231 | 1789 | 3840 |
| siRNA4203/4232 | 1791 | 3842 |
| siRNA4204/4232 | 1791 | 3842 |
| siRNA4205/4232 | 1791 | 3842 |
| siRNA4206/4232 | 1791 | 3842 |
| siRNA4207/4233 | 1864 | 3915 |
| siRNA4191/4228 | 1628 | 3679 |
| siRNA4192/4228 | 1628 | 3679 |
| siRNA4193/4228 | 1628 | 3679 |
| siRNA4194/4228 | 1628 | 3679 |
| siRNA4195/4228 | 1628 | 3679 |
| siRNA4196/4228 | 1628 | 3679 |
| siRNA4197/4228 | 1628 | 3679 |
| siRNA4198/4229 | 1630 | 3681 |
| siRNA4199/4229 | 1630 | 3681 |
| siRNA4200/4229 | 1630 | 3681 |
| siRNA4201/4230 | 1788 | 3839 |
| siRNA4202/4231 | 1789 | 3840 |
| siRNA4203/4232 | 1791 | 3842 |
| siRNA4204/4232 | 1791 | 3842 |
| siRNA4205/4232 | 1791 | 3842 |
| siRNA4206/4232 | 1791 | 3842 |
| siRNA4207/4233 | 1864 | 3915 |

[0278] Any siRNA among any of subsets A-E may comprise any modification pattern described herein. If a sequence has a different number of nucleotides in length than a modification pattern, the modification pattern may still be used with the appropriate number of additional nucleotides added 5′ or 3′ to match the number of nucleotides in the modification pattern. For example, if a sense or antisense strand of the siRNA among any of subsets A-E comprises 19 nucleotides, and a modification pattern comprises 21 nucleotides, UU may be added onto the 5′ end of the sense or antisense strand.

[0279] Therapeutic siRNAs were designed to target human HGFAC as described above and, in some cases, the HGFAC sequence of at least one toxicology-relevant species, in this case, the non-human primate (NHP) cynomolgus monkey. The siRNAs included in subset G had the following characteristics and are shown in Table G:
[0280] Cross-reactivity: With 19mer in human HGFAC mRNA, with 17mer (pos. 2-18) in NHP HGFAC
[0281] Specificity category: For human considering only those off-targets expressed in hepatocytes: AS2 or better, SS4 or better. For NHP AS2 or better, SS4 or better.
[0282] SNPs: siRNA target sites do not harbor SNPs with a MAF≥1% (pos. 2-18)

TABLE G
Subset G siRNAs

| | SEQ | Sense strand | SEQ | Antisense strand |
|---|---|---|---|---|
| | ID | sequence | ID | sequence |
| siRNA Name | NO: | (5′-3′) | NO: | (5′-3′) |
| siRNA 171 | 171 | AACCUAAUGCCACAGCGAC | 2222 | GUCGCUGUGGCAUUAGGUU |
| siRNA 203 | 203 | ACUAUCCUGGUGACCUCUG | 2254 | CAGAGGUCACCAGGAUAGU |
| siRNA 428 | 428 | UGGUGUGCCACAACUCACA | 2479 | UGUGAGUUGUGGCACACCA |
| siRNA 431 | 431 | UGUGCCACAACUCACAACU | 2482 | AGUUGUGAGUUGUGGCACA |
| siRNA 437 | 437 | ACAACUCACAACUACGACC | 2488 | GGUCGUAGUUGUGAGUUGU |
| siRNA 439 | 439 | AACUCACAACUACGACCGG | 2490 | CCGGUCGUAGUUGUGAGUU |
| siRNA 442 | 442 | UCACAACUACGACCGGGAC | 2493 | GUCCCGGUCGUAGUUGUGA |
| siRNA 1230 | 1230 | AGAAGAGGACGUUCCUGCG | 3281 | CGCAGGAACGUCCUCUUCU |
| siRNA 1425 | 1425 | AGCACUUCUUCAACCGCAC | 3476 | GUGCGGUUGAAGAAGUGCU |
| siRNA 1427 | 1427 | CACUUCUUCAACCGCACGA | 3478 | UCGUGCGGUUGAAGAAGUG |
| siRNA 1428 | 1428 | ACUUCUUCAACCGCACGAC | 3479 | GUCGUGCGGUUGAAGAAGU |
| siRNA 1429 | 1429 | CUUCUUCAACCGCACGACG | 3480 | CGUCGUGCGGUUGAAGAAG |
| siRNA 1430 | 1430 | UUCUUCAACCGCACGACGG | 3481 | CCGUCGUGCGGUUGAAGAA |
| siRNA 1431 | 1431 | UCUUCAACCGCACGACGGA | 3482 | UCCGUCGUGCGGUUGAAGA |
| siRNA 1463 | 1463 | UUCGGCAUCGAGAAGUACA | 3514 | UGUACUUCUCGAUGCCGAA |
| siRNA 1469 | 1469 | AUCGAGAAGUACAUCCCGU | 3520 | ACGGGAUGUACUUCUCGAU |
| siRNA 1470 | 1470 | UCGAGAAGUACAUCCCGUA | 3521 | UACGGGAUGUACUUCUCGA |
| siRNA 1474 | 1474 | GAAGUACAUCCCGUACACC | 3525 | GGUGUACGGGAUGUACUUC |
| siRNA 1779 | 1779 | UCUGUGCCGGCUACUUCGA | 3830 | UCGAAGUAGCCGGCACAGA |
| siRNA 1789 | 1789 | CUACUUCGACUGCAAGUCC | 3840 | GGACUUGCAGUCGAAGUAG |
| siRNA 1791 | 1791 | ACUUCGACUGCAAGUCCGA | 3842 | UCGGACUUGCAGUCGAAGU |
| siRNA 1793 | 1793 | UUCGACUGCAAGUCCGACG | 3844 | CGUCGGACUUGCAGUCGAA |
| siRNA 1864 | 1864 | UUACCUCUACGGCAUCAUC | 3915 | GAUGAUGCCGUAGAGGUAA |

[0283] In some cases, the sense strand of any of the siRNAs of subset G comprises siRNA with a particular modification pattern. In this modification pattern, position 9 counting from the 5′ end of the of the sense strand is has the 2′F modification. If position 9 of the sense strand is a pyrimidine, then all purines in the sense strand have the 2′OMe modification. If position 9 is the only pyrimidine between positions 5 and 11 of the sense stand, then position 9 is the only position with the 2′F modification in the sense strand. If position 9 and only one other base between positions 5 and 11 of the sense strand are pyrimidines, then both of these pyrimidines are the only two positions with the 2′F modification in the sense strand. If position 9 and only two other bases between positions 5 and 11 of the sense strand are pyrimidines, and those two other pyrimidines are in adjacent positions so that there would be not three 2′F modifications in a row, then any combination of 2′F modifications can be made that give three 2′F modifications in total. If there are >2 pyrimidines between positions 5 and 11 of the sense strand, then all combinations of pyrimidines having the 2′F modification are allowed that have three to five 2′F modifications in total, provided that the sense strand does not have three 2′F modifications in a row. If position 9 of the sense strand is a purine, then all purines in the sense strand have the 2′OMe modification. If position 9 is the only purine between positions 5 and 11 of the sense stand, then position 9 is the only position with the 2′F modification in the sense strand. If position 9 and only one other base between positions 5 and 11 of the sense strand are purines, then both of these purines are the only two positions with the 2′F modification in the sense strand. If position 9 and only two other bases between positions 5 and 11 of the sense strand are purines, and those two other purines are in adjacent positions so that there would be not three 2′F modifications in a row, then any combination of 2′F modifications can be made that give three 2′F modifications in total. If there are >2 purines between positions 5 and 11 of the sense strand, then all combinations of purines having the 2′F modification are allowed that have three to five 2′F modifications in total, provided that the sense strand does not have three 2′F modifications in a row.

[0284] In some cases, the sense strand of any of the siRNAs of subset G comprises a modification pattern which conforms to these sense strand rules. In some cases, a 2′ deoxy substitution may be used in sense strand (see, e.g., Table G(2)).

[0285] In some cases, the antisense strand of any of the siRNAs of subset G comprises modification pattern 3AS (see, e.g., Table G(2)). In some cases, a 2′ OMe substitution at position 2 of the antisense strand may be used (see, e.g., Table G(3)).

[0286] The siRNAs in subset G may comprise any other modification pattern(s).

TABLE G(2)
Modified Subset G siRNAs

| | SEQ | | SEQ | |
|---|---|---|---|---|
| | ID | Sense strand sequence | ID | Antisense strand sequence |
| siRNA Name | NO: | (5′-3′) | NO: | (5′-3′) |
| siRNA 4234/4320 | 4234 | aaccuAfAfuGfccacagcgaasusu | 4320 | usUfscGfcUfgUfgGfcAfuUfaGfgUfususu |
| siRNA 4672/4712 | 4672 | acuauccuGfGfugaccucuasusu | 4712 | usAfsgAfgGfuCfaCfcAfgGfaUfaGfususu |
| siRNA 4235/4713 | 4235 | acuaUfcCfUfdGGfugaccucuasusu | 4713 | usAfsgAfgGfuCfaCfcAfgGfaUfaGfususu |
| siRNA 4236/4321 | 4236 | uggugugCfCfaCfaacucacasusu | 4321 | usGfsuGfaGfuUfgUfgGfcAfcAfcCfasusu |
| siRNA 4237/4321 | 4237 | uggugUfgcCfaCfaacucacasusu | 4321 | usGfsuGfaGfuUfgUfgGfcAfcAfcCfasusu |
| siRNA 4238/4321 | 4238 | uggugUfgCfCfacaacucacasusu | 4321 | usGfsuGfaGfuUfgUfgGfcAfcAfcCfasusu |
| siRNA 4239/4321 | 4239 | uggugUfgCfCfaCfaacucacasusu | 4321 | usGfsuGfaGfuUfgUfgGfcAfcAfcCfasusu |
| siRNA 4673/4714 | 4673 | ugugccAfcAfAfcucacaacasusu | 4714 | usGfsuUfgUfgAfgUfuGfuGfgCfaCfasusu |
| siRNA 4674/4715 | 4674 | acaacUfCfaCfaacuacgacasusu | 4715 | usGfsuCfgUfaGfuUfgUfgAfgUfuGfususu |
| siRNA 4675/4716 | 4675 | acaaCfuCfaCfaacuacgacasusu | 4716 | usGfsuCfgUfaGfuUfgUfgAfgUfuGfususu |
| siRNA 4676/4717 | 4676 | acaaCfUfcaCfaacuacgacasusu | 4717 | usGfsuCfgUfaGfuUfgUfgAfgUfuGfususu |
| siRNA 4240/4322 | 4240 | aacucAfcAfAfcuacgaccgasusu | 4322 | usCfsgGfuCfgUfaGfuUfgUfgAfgUfususu |
| siRNA 4241/4323 | 4241 | ucacaAfcuAfcGfaccgggaasusu | 4323 | usUfscCfcGfgUfcGfuAfgUfuGfuGfasusu |
| siRNA 4242/4323 | 4242 | ucacAfacuAfcGfaccgggaasusu | 4323 | usUfscCfcGfgUfcGfuAfgUfuGfuGfasusu |
| siRNA 4243/4323 | 4243 | ucacAfAfcuAfcgaccgggaasusu | 4323 | usUfscCfcGfgUfcGfuAfgUfuGfuGfasusu |
| siRNA 4244/4323 | 4244 | ucacAfAfcuAfcGfaccgggaasusu | 4323 | usUfscCfcGfgUfcGfuAfgUfuGfuGfasusu |
| siRNA 4245/4324 | 4245 | agaagagGfAfcGfuuccugcasusu | 4324 | usGfscAfgGfaAfcGfuCfcUfcUfuCfususu |
| siRNA 4246/4324 | 4246 | agaagaGfgAfcGfuuccugcasusu | 4324 | usGfscAfgGfaAfcGfuCfcUfcUfuCfususu |
| siRNA 4247/4324 | 4247 | agaagAfggAfcGfuuccugcasusu | 4324 | usGfscAfgGfaAfcGfuCfcUfcUfuCfususu |
| siRNA 4248/4324 | 4248 | agaagAfgGfAfcguuccugcasusu | 4324 | usGfscAfgGfaAfcGfuCfcUfcUfuCfususu |
| siRNA 4249/4324 | 4249 | agaagAfgGfAfcGfuuccugcasusu | 4324 | usGfscAfgGfaAfcGfuCfcUfcUfuCfususu |
| siRNA 4250/4324 | 4250 | agaagAfGfgAfcguuccugcasusu | 4324 | usGfscAfgGfaAfcGfuCfcUfcUfuCfususu |
| siRNA 4251/4324 | 4251 | agaagAfGfgAfcGfuuccugcasusu | 4324 | usGfscAfgGfaAfcGfuCfcUfcUfuCfususu |
| siRNA 4252/4324 | 4252 | agaagAfGfGfAfcguuccugcasusu | 4324 | usGfscAfgGfaAfcGfuCfcUfcUfuCfususu |
| siRNA 4253/4324 | 4253 | agaagAfGfGfAfcGfuuccugcasusu | 4324 | usGfscAfgGfaAfcGfuCfcUfcUfuCfususu |
| siRNA 4254/4324 | 4254 | agaaGfaggAfcGfuuccugcasusu | 4324 | usGfscAfgGfaAfcGfuCfcUfcUfuCfususu |
| siRNA 4255/4324 | 4255 | agaaGfagGfAfcguuccugcasusu | 4324 | usGfscAfgGfaAfcGfuCfcUfcUfuCfususu |
| siRNA 4256/4324 | 4256 | agaaGfagGfAfcGfuuccugcasusu | 4324 | usGfscAfgGfaAfcGfuCfcUfcUfuCfususu |
| siRNA 4257/4324 | 4257 | agaaGfaGfgAfcguuccugcasusu | 4324 | usGfscAfgGfaAfcGfuCfcUfcUfuCfususu |
| siRNA 4258/4324 | 4258 | agaaGfaGfgAfcGfuuccugcasusu | 4324 | usGfscAfgGfaAfcGfuCfcUfcUfuCfususu |
| siRNA 4259/4324 | 4259 | agaaGfAfggAfcguuccugcasusu | 4324 | usGfscAfgGfaAfcGfuCfcUfcUfuCfususu |
| siRNA 4260/4324 | 4260 | agaaGfAfggAfcGfuuccugcasusu | 4324 | usGfscAfgGfaAfcGfuCfcUfcUfuCfususu |
| siRNA 4261/4324 | 4261 | agaaGfAfgGfAfcguuccugcasusu | 4324 | usGfscAfgGfaAfcGfuCfcUfcUfuCfususu |
| siRNA 4262/4324 | 4262 | agaaGfAfgGfAfcGfuuccugcasusu | 4324 | usGfscAfgGfaAfcGfuCfcUfcUfuCfususu |
| siRNA 4263/4324 | 4263 | agaaGfAfGfGfAfcguuccugcasusu | 4324 | usGfscAfgGfaAfcGfuCfcUfcUfuCfususu |
| siRNA 4264/4325 | 4264 | agcacuuCfUfuCfaaccgcaasusu | 4325 | usUfsgCfgGfuUfgAfaGfaAfgUfgCfususu |
| siRNA 4265/4325 | 4265 | agcacuuCfUfUfCfaaccgcaasusu | 4325 | usUfsgCfgGfuUfgAfaGfaAfgUfgCfususu |
| siRNA 4266/4325 | 4266 | agcacuUfcUfuCfaaccgcaasusu | 4325 | usUfsgCfgGfuUfgAfaGfaAfgUfgCfususu |
| siRNA 4267/4325 | 4267 | agcacuUfcUfUfcaaccgcaasusu | 4325 | usUfsgCfgGfuUfgAfaGfaAfgUfgCfususu |
| siRNA 4268/4325 | 4268 | agcacuUfCfUfUfcaaccgcaasusu | 4325 | usUfsgCfgGfuUfgAfaGfaAfgUfgCfususu |
| siRNA 4269/4325 | 4269 | agcacuUfCfUfUfCfaaccgcaasusu | 4325 | usUfsgCfgGfuUfgAfaGfaAfgUfgCfususu |
| siRNA 4270/4325 | 4270 | agcacUfucUfuCfaaccgcaasusu | 4325 | usUfsgCfgGfuUfgAfaGfaAfgUfgCfususu |
| siRNA 4271/4325 | 4271 | agcacUfucUfUfcaaccgcaasusu | 4325 | usUfsgCfgGfuUfgAfaGfaAfgUfgCfususu |
| siRNA 4272/4325 | 4272 | agcacUfuCfUfucaaccgcaasusu | 4325 | usUfsgCfgGfuUfgAfaGfaAfgUfgCfususu |
| siRNA 4273/4325 | 4273 | agcacUfuCfUfuCfaaccgcaasusu | 4325 | usUfsgCfgGfuUfgAfaGfaAfgUfgCfususu |
| siRNA 4274/4325 | 4274 | agcacUfuCfUfUfCfaaccgcaasusu | 4325 | usUfsgCfgGfuUfgAfaGfaAfgUfgCfususu |
| siRNA 4275/4325 | 4275 | agcacUfUfcUfucaaccgcaasusu | 4325 | usUfsgCfgGfuUfgAfaGfaAfgUfgCfususu |
| siRNA 4276/4325 | 4276 | agcacUfUfcUfuCfaaccgcaasusu | 4325 | usUfsgCfgGfuUfgAfaGfaAfgUfgCfususu |
| siRNA 4277/4325 | 4277 | agcacUfUfcUfUfcaaccgcaasusu | 4325 | usUfsgCfgGfuUfgAfaGfaAfgUfgCfususu |
| siRNA 4278/4325 | 4278 | agcacUfUfCfUfucaaccgcaasusu | 4325 | usUfsgCfgGfuUfgAfaGfaAfgUfgCfususu |
| siRNA 4279/4325 | 4279 | agcacUfUfCfUfuCfaaccgcaasusu | 4325 | usUfsgCfgGfuUfgAfaGfaAfgUfgCfususu |
| siRNA 4280/4325 | 4280 | agcacUfUfCfUfUfcaaccgcaasusu | 4325 | usUfsgCfgGfuUfgAfaGfaAfgUfgCfususu |
| siRNA 4281/4325 | 4281 | agcaCfuucUfuCfaaccgcaasusu | 4325 | usUfsgCfgGfuUfgAfaGfaAfgUfgCfususu |
| siRNA 4282/4325 | 4282 | agcaCfuucUfUfcaaccgcaasusu | 4325 | usUfsgCfgGfuUfgAfaGfaAfgUfgCfususu |
| siRNA 4283/4325 | 4283 | agcaCfuuCfUfucaaccgcaasusu | 4325 | usUfsgCfgGfuUfgAfaGfaAfgUfgCfususu |
| siRNA 4284/4325 | 4284 | agcaCfuuCfUfuCfaaccgcaasusu | 4325 | usUfsgCfgGfuUfgAfaGfaAfgUfgCfususu |
| siRNA 4285/4325 | 4285 | agcaCfuuCfUfUfCfaaccgcaasusu | 4325 | usUfsgCfgGfuUfgAfaGfaAfgUfgCfususu |
| siRNA 4286/4325 | 4286 | agcaCfuUfcUfucaaccgcaasusu | 4325 | usUfsgCfgGfuUfgAfaGfaAfgUfgCfususu |
| siRNA 4287/4325 | 4287 | agcaCfuUfcUfuCfaaccgcaasusu | 4325 | usUfsgCfgGfuUfgAfaGfaAfgUfgCfususu |
| siRNA 4288/4325 | 4288 | agcaCfuUfcUfUfcaacegcaasusu | 4325 | usUfsgCfgGfuUfgAfaGfaAfgUfgCfususu |
| siRNA 4289/4325 | 4289 | agcaCfuUfCfUfUfcaaccgcaasusu | 4325 | usUfsgCfgGfuUfgAfaGfaAfgUfgCfususu |
| siRNA 4290/4325 | 4290 | agcaCfUfucUfucaaccgcaasusu | 4325 | usUfsgCfgGfuUfgAfaGfaAfgUfgCfususu |
| siRNA 4291/4325 | 4291 | agcaCfUfucUfuCfaaccgcaasusu | 4325 | usUfsgCfgGfuUfgAfaGfaAfgUfgCfususu |
| siRNA 4292/4325 | 4292 | agcaCfUfucUfUfcaaccgcaasusu | 4325 | usUfsgCfgGfuUfgAfaGfaAfgUfgCfususu |
| siRNA 4293/4325 | 4293 | agcaCfUfuCfUfucaaccgcaasusu | 4325 | usUfsgCfgGfuUfgAfaGfaAfgUfgCfususu |
| siRNA 4294/4325 | 4294 | agcaCfUfuCfUfuCfaaccgcaasusu | 4325 | usUfsgCfgGfuUfgAfaGfaAfgUfgCfususu |
| siRNA 4295/4325 | 4295 | agcaCfUfUfCfUfucaaccgcaasusu | 4325 | usUfsgCfgGfuUfgAfaGfaAfgUfgCfususu |
| siRNA 4296/4326 | 4296 | cacuuCfuUfCfaaccgcacgasusu | 4326 | usCfsgUfgCfgGfuUfgAfaGfaAfgUfgsusu |
| siRNA 4297/4326 | 4297 | cacuuCfUfuCfaaccgcacgasusu | 4326 | usCfsgUfgCfgGfuUfgAfaGfaAfgUfgsusu |
| siRNA 4298/4326 | 4298 | cacuuCfUfUfCfaaccgcacgasusu | 4326 | usCfsgUfgCfgGfuUfgAfaGfaAfgUfgsusu |
| siRNA 4299/4326 | 4299 | cacuUfcuUfCfaaccgcacgasusu | 4326 | usCfsgUfgCfgGfuUfgAfaGfaAfgUfgsusu |
| siRNA 4300/4326 | 4300 | cacuUfcUfuCfaaccgcacgasusu | 4326 | usCfsgUfgCfgGfuUfgAfaGfaAfgUfgsusu |
| siRNA 4301/4326 | 4301 | cacuUfCfuuCfaaccgcacgasusu | 4326 | usCfsgUfgCfgGfuUfgAfaGfaAfgUfgsusu |
| siRNA 4302/4326 | 4302 | cacuUfCfuUfCfaaccgcacgasusu | 4326 | usCfsgUfgCfgGfuUfgAfaGfaAfgUfgsusu |
| siRNA 4303/4326 | 4303 | cacuUfCfUfUfCfaaccgcacgasusu | 4326 | usCfsgUfgCfgGfuUfgAfaGfaAfgUfgsusu |
| siRNA 4677/4718 | 4677 | acuucuucAfAfccgcacgaasusu | 4718 | usUfscGfuGfcGfgUfuGfaAfgAfaGfususu |
| siRNA 4304/4719 | 4304 | acuuCfuUfCfdAAfccgcacgaasusu | 4719 | usUfscGfuGfcGfgUfuGfaAfgAfaGfususu |
| siRNA 4305/4327 | 4305 | cuucuucAfAfccgcacgacasusu | 4327 | usGfsuCfgUfgCfgGfuUfgAfaGfaAfgsusu |
| siRNA 4306/4327 | 4306 | cuucUfuCfAfdAccgcacgacasusu | 4327 | usGfsuCfgUfgCfgGfuUfgAfaGfaAfgsusu |
| siRNA 4307/4328 | 4307 | uucuuCfaaCfCfgcacgacgasusu | 4328 | usCfsgUfcGfuGfcGfgUfuGfaAfgAfasusu |
| siRNA 4308/4328 | 4308 | uucuUfcaaCfCfgcacgacgasusu | 4328 | usCfsgUfcGfuGfcGfgUfuGfaAfgAfasusu |
| siRNA 4309/4328 | 4309 | uucuUfCfaaCfcgcacgacgasusu | 4328 | usCfsgUfcGfuGfcGfgUfuGfaAfgAfasusu |
| siRNA 4310/4328 | 4310 | uucuUfCfaaCfCfgcacgacgasusu | 4328 | usCfsgUfcGfuGfcGfgUfuGfaAfgAfasusu |
| siRNA 4311/4329 | 4311 | ucuucaaCfCfgCfacgacggasusu | 4329 | usCfscGfuCfgUfgCfgGfuUfgAfaGfasusu |
| siRNA 4312/4329 | 4312 | ucuuCfaacCfgCfacgacggasusu | 4329 | usCfscGfuCfgUfgCfgGfuUfgAfaGfasusu |
| siRNA 4313/4329 | 4313 | ucuuCfaaCfCfgcacgacggasusu | 4329 | usCfscGfuCfgUfgCfgGfuUfgAfaGfasusu |
| siRNA 4314/4329 | 4314 | ucuuCfaaCfCfgCfacgacggasusu | 4329 | usCfscGfuCfgUfgCfgGfuUfgAfaGfasusu |
| siRNA 4678/4720 | 4678 | uucggCfaUfCfgagaaguacasusu | 4720 | usGfsuAfcUfuCfuCfgAfuGfcCfgAfasusu |
| siRNA 4679/4721 | 4679 | aucgagaAfGfuAfcaucccgasusu | 4721 | usCfsgGfgAfuGfuAfcUfuCfuCfgAfususu |
| siRNA 4680/4722 | 4680 | aucgagAfaGfuAfcaucccgasusu | 4722 | usCfsgGfgAfuGfuAfcUfuCfuCfgAfususu |
| siRNA 4681/4723 | 4681 | aucgaGfaaGfuAfcaucccgasusu | 4723 | usCfsgGfgAfuGfuAfcUfuCfuCfgAfususu |
| siRNA 4682/4724 | 4682 | aucgaGfaAfGfuacaucccgasusu | 4724 | usCfsgGfgAfuGfuAfcUfuCfuCfgAfususu |
| siRNA 4683/4725 | 4683 | aucgaGfaAfGfuAfcaucccgasusu | 4725 | usCfsgGfgAfuGfuAfcUfuCfuCfgAfususu |
| siRNA 4684/4726 | 4684 | aucgaGfAfaGfuacaucccgasusu | 4726 | usCfsgGfgAfuGfuAfcUfuCfuCfgAfususu |
| siRNA 4685/4727 | 4685 | aucgaGfAfaGfuAfcaucccgasusu | 4727 | usCfsgGfgAfuGfuAfcUfuCfuCfgAfususu |
| siRNA 4686/4728 | 4686 | aucgaGfAfAfGfuacaucccgasusu | 4728 | usCfsgGfgAfuGfuAfcUfuCfuCfgAfususu |
| siRNA 4687/4729 | 4687 | aucgaGfAfAfGfuAfcaucccgasusu | 4729 | usCfsgGfgAfuGfuAfcUfuCfuCfgAfususu |
| siRNA 4688/4730 | 4688 | aucgAfgaaGfuAfcaucccgasusu | 4730 | usCfsgGfgAfuGfuAfcUfuCfuCfgAfususu |
| siRNA 4689/4731 | 4689 | aucgAfgaAfGfuacaucccgasusu | 4731 | usCfsgGfgAfuGfuAfcUfuCfuCfgAfususu |
| siRNA 4690/4732 | 4690 | aucgAfgaAfGfuAfcaucccgasusu | 4732 | usCfsgGfgAfuGfuAfcUfuCfuCfgAfususu |
| siRNA 4691/4733 | 4691 | aucgAfgAfaGfuacaucccgasusu | 4733 | usCfsgGfgAfuGfuAfcUfuCfuCfgAfususu |
| siRNA 4692/4734 | 4692 | aucgAfgAfaGfuAfcaucccgasusu | 4734 | usCfsgGfgAfuGfuAfcUfuCfuCfgAfususu |
| siRNA 4693/4735 | 4693 | aucgAfGfaaGfuacaucccgasusu | 4735 | usCfsgGfgAfuGfuAfcUfuCfuCfgAfususu |
| siRNA 4694/4736 | 4694 | aucgAfGfaaGfuAfcaucccgasusu | 4736 | usCfsgGfgAfuGfuAfcUfuCfuCfgAfususu |
| siRNA 4695/4737 | 4695 | aucgAfGfaAfGfuacaucccgasusu | 4737 | usCfsgGfgAfuGfuAfcUfuCfuCfgAfususu |
| siRNA 4696/4738 | 4696 | aucgAfGfaAfGfuAfcaucccgasusu | 4738 | usCfsgGfgAfuGfuAfcUfuCfuCfgAfususu |
| siRNA 4697/4739 | 4697 | aucgAfGfAfAfGfuacaucccgasusu | 4739 | usCfsgGfgAfuGfuAfcUfuCfuCfgAfususu |
| siRNA 4698/4740 | 4698 | ucgagaagUfaCfaucccguasusu | 4740 | usAfscGfgGfaUfgUfaCfuUfcUfcGfasusu |
| siRNA 4315/4741 | 4315 | ucgaGfaAfGfdTaCfaucccguasusu | 4741 | usAfscGfgGfaUfgUfaCfuUfcUfcGfasusu |
| siRNA 4699/4742 | 4699 | gaaguaCfaUfcCfcguacacasusu | 4742 | usGfsuGfuAfcGfgGfaUfgUfaCfuUfcsusu |
| siRNA 4700/4743 | 4700 | gaaguaCfaUfCfccguacacasusu | 4743 | usGfsuGfuAfcGfgGfaUfgUfaCfuUfcsusu |
| siRNA 4701/4744 | 4701 | gaagUfacaUfcCfcguacacasusu | 4744 | usGfsuGfuAfcGfgGfaUfgUfaCfuUfcsusu |
| siRNA 4702/4745 | 4702 | gaagUfacaUfCfccguacacasusu | 4745 | usGfsuGfuAfcGfgGfaUfgUfaCfuUfcsusu |
| siRNA 4703/4746 | 4703 | gaagUfaCfaUfcccguacacasusu | 4746 | usGfsuGfuAfcGfgGfaUfgUfaCfuUfcsusu |
| siRNA 4704/4747 | 4704 | gaagUfaCfaUfcCfcguacacasusu | 4747 | usGfsuGfuAfcGfgGfaUfgUfaCfuUfcsusu |
| siRNA 4705/4748 | 4705 | gaagUfaCfaUfCfccguacacasusu | 4748 | usGfsuGfuAfcGfgGfaUfgUfaCfuUfcsusu |
| siRNA 4316/4330 | 4316 | ucuguGfccGfGfcuacuucgasusu | 4330 | usCfsgAfaGfuAfgCfcGfgCfaCfaGfasusu |
| siRNA 4706/4749 | 4706 | cuacuucGfAfcugcaagucasusu | 4749 | usGfsaCfuUfgCfaGfuCfgAfaGfuAfgsusu |
| siRNA 4317/4750 | 4317 | cuacUfuCfGfdAcugcaagucasusu | 4750 | usGfsaCfuUfgCfaGfuCfgAfaGfuAfgsusu |
| siRNA 4707/4751 | 4707 | acuucgaCfUfgCfaaguccgasusu | 4751 | usCfsgGfaCfuUfgCfaGfuCfgAfaGfususu |
| siRNA 4708/4752 | 4708 | acuuCfgacUfgCfaaguccgasusu | 4752 | usCfsgGfaCfuUfgCfaGfuCfgAfaGfususu |
| siRNA 4709/4753 | 4709 | acuuCfgaCfUfgcaaguccgasusu | 4753 | usCfsgGfaCfuUfgCfaGfuCfgAfaGfususu |
| siRNA 4710/4754 | 4710 | acuuCfgaCfUfgCfaaguccgasusu | 4754 | usCfsgGfaCfuUfgCfaGfuCfgAfaGfususu |
| siRNA 4318/4331 | 4318 | uucgaCfUfgCfaaguccgacasusu | 4331 | usGfsuCfgGfaCfuUfgCfaGfuCfgAfasusu |
| siRNA 4711/4755 | 4711 | uuaccucuAfcGfgcaucauasusu | 4755 | usAfsuGfaUfgCfcGfuAfgAfgGfuAfasusu |
| siRNA 4319/4756 | 4319 | uuacCfuCfUfdAcGfgcaucauasusu | 4756 | usAfsuGfaUfgCfcGfuAfgAfgGfuAfasusu |

TABLE G(3)
Modified Subset G siRNAs with a 2′OMe Substitution at Position 2 of the AS Strand

| | SEQ | | SEQ | |
|---|---|---|---|---|
| | ID | Sense strand sequence | ID | Antisense strand sequence |
| siRNA Name | NO: | (5′-3′) | NO: | (5′-3′) |
| siRNA 4234/2222 | 4234 | aaccuAfAfuGfccacagcgaasusu | 4332 | uucGfcUfgUfgGfcAfuUfaGfgUfususu |
| siRNA 4672/4333 | 4672 | acuauccuGfGfugaccucuasusu | 4333 | uagAfgGfuCfaCfcAfgGfaUfaGfususu |
| siRNA 4235/4333 | 4235 | acuaUfcCfUfdGGfugaccucuasusu | 4333 | uagAfgGfuCfaCfcAfgGfaUfaGfususu |
| siRNA 4236/4334 | 4236 | uggugugCfCfaCfaacucacasusu | 4334 | uguGfaGfuUfgUfgGfcAfcAfcCfasusu |
| siRNA 4237/4334 | 4237 | uggugUfgcCfaCfaacucacasusu | 4334 | uguGfaGfuUfgUfgGfcAfcAfcCfasusu |
| siRNA 4238/4334 | 4238 | uggugUfgCfCfacaacucacasusu | 4334 | uguGfaGfuUfgUfgGfcAfcAfcCfasusu |
| siRNA 4239/4334 | 4239 | uggugUfgCfCfaCfaacucacasusu | 4334 | uguGfaGfuUfgUfgGfcAfcAfcCfasusu |
| siRNA 4673/4335 | 4673 | ugugccAfcAfAfcucacaacasusu | 4335 | uguUfgUfgAfgUfuGfuGfgCfaCfasusu |
| siRNA 4674/4336 | 4674 | acaacUfCfaCfaacuacgacasusu | 4336 | uguCfgUfaGfuUfgUfgAfgUfuGfususu |
| siRNA 4675/4336 | 4675 | acaaCfuCfaCfaacuacgacasusu | 4336 | uguCfgUfaGfuUfgUfgAfgUfuGfususu |
| siRNA 4676/4336 | 4676 | acaaCfUfcaCfaacuacgacasusu | 4336 | uguCfgUfaGfuUfgUfgAfgUfuGfususu |
| siRNA 4240/4337 | 4240 | aacucAfcAfAfcuacgaccgasusu | 4337 | ucgGfuCfgUfaGfuUfgUfgAfgUfususu |
| siRNA 4241/4338 | 4241 | ucacaAfcuAfcGfaccgggaasusu | 4338 | uucCfcGfgUfcGfuAfgUfuGfuGfasusu |
| siRNA 4242/4338 | 4242 | ucacAfacuAfcGfaccgggaasusu | 4338 | uucCfcGfgUfcGfuAfgUfuGfuGfasusu |
| siRNA 4243/4338 | 4243 | ucacAfAfcuAfcgaccgggaasusu | 4338 | uucCfcGfgUfcGfuAfgUfuGfuGfasusu |
| siRNA 4244/4338 | 4244 | ucacAfAfcuAfcGfaccgggaasusu | 4338 | uucCfcGfgUfcGfuAfgUfuGfuGfasusu |
| siRNA 4245/4339 | 4245 | agaagagGfAfcGfuuccugcasusu | 4339 | ugcAfgGfaAfcGfuCfcUfcUfuCfususu |
| siRNA 4246/4339 | 4246 | agaagaGfgAfcGfuuccugcasusu | 4339 | ugcAfgGfaAfcGfuCfcUfcUfuCfususu |
| siRNA 4247/4339 | 4247 | agaagAfggAfcGfuuccugcasusu | 4339 | ugcAfgGfaAfcGfuCfcUfcUfuCfususu |
| siRNA 4248/4339 | 4248 | agaagAfgGfAfcguuccugcasusu | 4339 | ugcAfgGfaAfcGfuCfcUfcUfuCfususu |
| siRNA 4249/4339 | 4249 | agaagAfgGfAfcGfuuccugcasusu | 4339 | ugcAfgGfaAfcGfuCfcUfcUfuCfususu |
| siRNA 4250/4339 | 4250 | agaagAfGfgAfcguuccugcasusu | 4339 | ugcAfgGfaAfcGfuCfcUfcUfuCfususu |
| siRNA 4251/4339 | 4251 | agaagAfGfgAfcGfuuccugcasusu | 4339 | ugcAfgGfaAfcGfuCfcUfcUfuCfususu |
| siRNA 4252/4339 | 4252 | agaagAfGfGfAfcguuccugcasusu | 4339 | ugcAfgGfaAfcGfuCfcUfcUfuCfususu |
| siRNA 4253/4339 | 4253 | agaagAfGfGfAfcGfuuccugcasusu | 4339 | ugcAfgGfaAfcGfuCfcUfcUfuCfususu |
| siRNA 4254/4339 | 4254 | agaaGfaggAfcGfuuccugcasusu | 4339 | ugcAfgGfaAfcGfuCfcUfcUfuCfususu |
| siRNA 4255/4339 | 4255 | agaaGfagGfAfcguuccugcasusu | 4339 | ugcAfgGfaAfcGfuCfcUfcUfuCfususu |
| siRNA 4256/4339 | 4256 | agaaGfagGfAfcGfuuccugcasusu | 4339 | ugcAfgGfaAfcGfuCfcUfcUfuCfususu |
| siRNA 4257/4339 | 4257 | agaaGfaGfgAfcguuccugcasusu | 4339 | ugcAfgGfaAfcGfuCfcUfcUfuCfususu |
| siRNA 4258/4339 | 4258 | agaaGfaGfgAfcGfuuccugcasusu | 4339 | ugcAfgGfaAfcGfuCfcUfcUfuCfususu |
| siRNA 4259/4339 | 4259 | agaaGfAfggAfcguuccugcasusu | 4339 | ugcAfgGfaAfcGfuCfcUfcUfuCfususu |
| siRNA 4260/4339 | 4260 | agaaGfAfggAfcGfuuccugcasusu | 4339 | ugcAfgGfaAfcGfuCfcUfcUfuCfususu |
| siRNA 4261/4339 | 4261 | agaaGfAfgGfAfcguuccugcasusu | 4339 | ugcAfgGfaAfcGfuCfcUfcUfuCfususu |
| siRNA 4262/4339 | 4262 | agaaGfAfgGfAfcGfuuccugcasusu | 4339 | ugcAfgGfaAfcGfuCfcUfcUfuCfususu |
| siRNA 4263/4339 | 4263 | agaaGfAfGfGfAfcguuccugcasusu | 4339 | ugcAfgGfaAfcGfuCfcUfcUfuCfususu |
| siRNA 4264/4340 | 4264 | agcacuuCfUfuCfaaccgcaasusu | 4340 | uugCfgGfuUfgAfaGfaAfgUfgCfususu |
| siRNA 4265/4340 | 4265 | agcacuuCfUfUfCfaaccgcaasusu | 4340 | uugCfgGfuUfgAfaGfaAfgUfgCfususu |
| siRNA 4266/4340 | 4266 | agcacuUfcUfuCfaaccgcaasusu | 4340 | uugCfgGfuUfgAfaGfaAfgUfgCfususu |
| siRNA 4267/4340 | 4267 | agcacuUfcUfUfcaaccgcaasusu | 4340 | uugCfgGfuUfgAfaGfaAfgUfgCfususu |
| siRNA 4268/4340 | 4268 | agcacuUfCfUfUfcaaccgcaasusu | 4340 | uugCfgGfuUfgAfaGfaAfgUfgCfususu |
| siRNA 4269/4340 | 4269 | agcacuUfCfUfUfCfaaccgcaasusu | 4340 | uugCfgGfuUfgAfaGfaAfgUfgCfususu |
| siRNA 4270/4340 | 4270 | agcacUfucUfuCfaaccgcaasusu | 4340 | uugCfgGfuUfgAfaGfaAfgUfgCfususu |
| siRNA 4271/4340 | 4271 | agcacUfucUfUfcaaccgcaasusu | 4340 | uugCfgGfuUfgAfaGfaAfgUfgCfususu |
| siRNA 4272/4340 | 4272 | agcacUfuCfUfucaaccgcaasusu | 4340 | uugCfgGfuUfgAfaGfaAfgUfgCfususu |
| siRNA 4273/4340 | 4273 | agcacUfuCfUfuCfaaccgcaasusu | 4340 | uugCfgGfuUfgAfaGfaAfgUfgCfususu |
| siRNA 4274/4340 | 4274 | agcacUfuCfUfUfCfaaccgcaasusu | 4340 | uugCfgGfuUfgAfaGfaAfgUfgCfususu |
| siRNA 4275/4340 | 4275 | agcacUfUfcUfucaaccgcaasusu | 4340 | uugCfgGfuUfgAfaGfaAfgUfgCfususu |
| siRNA 4276/4340 | 4276 | agcacUfUfcUfuCfaaccgcaasusu | 4340 | uugCfgGfuUfgAfaGfaAfgUfgCfususu |
| siRNA 4277/4340 | 4277 | agcacUfUfcUfUfcaaccgcaasusu | 4340 | uugCfgGfuUfgAfaGfaAfgUfgCfususu |
| siRNA 4278/4340 | 4278 | agcacUfUfCfUfucaaccgcaasusu | 4340 | uugCfgGfuUfgAfaGfaAfgUfgCfususu |
| siRNA 4279/4340 | 4279 | agcacUfUfCfUfuCfaaccgcaasusu | 4340 | uugCfgGfuUfgAfaGfaAfgUfgCfususu |
| siRNA 4280/4340 | 4280 | agcacUfUfCfUfUfcaaccgcaasusu | 4340 | uugCfgGfuUfgAfaGfaAfgUfgCfususu |
| siRNA 4281/4340 | 4281 | agcaCfuucUfuCfaaccgcaasusu | 4340 | uugCfgGfuUfgAfaGfaAfgUfgCfususu |
| siRNA 4282/4340 | 4282 | agcaCfuucUfUfcaaccgcaasusu | 4340 | uugCfgGfuUfgAfaGfaAfgUfgCfususu |
| siRNA 4283/4340 | 4283 | agcaCfuuCfUfucaaccgcaasusu | 4340 | uugCfgGfuUfgAfaGfaAfgUfgCfususu |
| siRNA 4284/4340 | 4284 | agcaCfuuCfUfuCfaaccgcaasusu | 4340 | uugCfgGfuUfgAfaGfaAfgUfgCfususu |
| siRNA 4285/4340 | 4285 | agcaCfuuCfUfUfCfaaccgcaasusu | 4340 | uugCfgGfuUfgAfaGfaAfgUfgCfususu |
| siRNA 4286/4340 | 4286 | agcaCfuUfcUfucaaccgcaasusu | 4340 | uugCfgGfuUfgAfaGfaAfgUfgCfususu |
| siRNA 4287/4340 | 4287 | agcaCfuUfcUfuCfaaccgcaasusu | 4340 | uugCfgGfuUfgAfaGfaAfgUfgCfususu |
| siRNA 4288/4340 | 4288 | agcaCfuUfcUfUfcaaccgcaasusu | 4340 | uugCfgGfuUfgAfaGfaAfgUfgCfususu |
| siRNA 4289/4340 | 4289 | agcaCfuUfCfUfUfcaaccgcaasusu | 4340 | uugCfgGfuUfgAfaGfaAfgUfgCfususu |
| siRNA 4290/4340 | 4290 | agcaCfUfucUfucaaccgcaasusu | 4340 | uugCfgGfuUfgAfaGfaAfgUfgCfususu |
| siRNA 4291/4340 | 4291 | agcaCfUfucUfuCfaaccgcaasusu | 4340 | uugCfgGfuUfgAfaGfaAfgUfgCfususu |
| siRNA 4292/4340 | 4292 | agcaCfUfucUfUfcaaccgcaasusu | 4340 | uugCfgGfuUfgAfaGfaAfgUfgCfususu |
| siRNA 4293/4340 | 4293 | agcaCfUfuCfUfucaaccgcaasusu | 4340 | uugCfgGfuUfgAfaGfaAfgUfgCfususu |
| siRNA 4294/4340 | 4294 | agcaCfUfuCfUfuCfaaccgcaasusu | 4340 | uugCfgGfuUfgAfaGfaAfgUfgCfususu |
| siRNA 4295/4340 | 4295 | agcaCfUfUfCfUfucaaccgcaasusu | 4340 | uugCfgGfuUfgAfaGfaAfgUfgCfususu |
| siRNA 4296/4341 | 4296 | cacuuCfuUfCfaaccgcacgasusu | 4341 | ucgUfgCfgGfuUfgAfaGfaAfgUfgsusu |
| siRNA 4297/4341 | 4297 | cacuuCfUfuCfaaccgcacgasusu | 4341 | ucgUfgCfgGfuUfgAfaGfaAfgUfgsusu |
| siRNA 4298/4341 | 4298 | cacuuCfUfUfCfaaccgcacgasusu | 4341 | ucgUfgCfgGfuUfgAfaGfaAfgUfgsusu |
| siRNA 4299/4341 | 4299 | cacuUfcuUfCfaaccgcacgasusu | 4341 | ucgUfgCfgGfuUfgAfaGfaAfgUfgsusu |
| siRNA 4300/4341 | 4300 | cacuUfcUfuCfaaccgcacgasusu | 4341 | ucgUfgCfgGfuUfgAfaGfaAfgUfgsusu |
| siRNA 4301/4341 | 4301 | cacuUfCfuuCfaaccgcacgasusu | 4341 | ucgUfgCfgGfuUfgAfaGfaAfgUfgsusu |
| siRNA 4302/4341 | 4302 | cacuUfCfuUfCfaaccgcacgasusu | 4341 | ucgUfgCfgGfuUfgAfaGfaAfgUfgsusu |
| siRNA 4303/4341 | 4303 | cacuUfCfUfUfCfaaccgcacgasusu | 4341 | ucgUfgCfgGfuUfgAfaGfaAfgUfgsusu |
| siRNA 4677/4342 | 4677 | acuucuucAfAfccgcacgaasusu | 4342 | uucGfuGfcGfgUfuGfaAfgAfaGfususu |
| siRNA 4304/4342 | 4304 | acuuCfuUfCfdAAfccgcacgaasusu | 4342 | uucGfuGfcGfgUfuGfaAfgAfaGfususu |
| siRNA 4305/4343 | 4305 | cuucuucAfAfccgcacgacasusu | 4343 | uguCfgUfgCfgGfuUfgAfaGfaAfgsusu |
| siRNA 4306/4343 | 4306 | cuucUfuCfAfdAccgcacgacasusu | 4343 | uguCfgUfgCfgGfuUfgAfaGfaAfgsusu |
| siRNA 4307/4344 | 4307 | uucuuCfaaCfCfgcacgacgasusu | 4344 | ucgUfcGfuGfcGfgUfuGfaAfgAfasusu |
| siRNA 4308/4344 | 4308 | uucuUfcaaCfCfgcacgacgasusu | 4344 | ucgUfcGfuGfcGfgUfuGfaAfgAfasusu |
| siRNA 4309/4344 | 4309 | uucuUfCfaaCfcgcacgacgasusu | 4344 | ucgUfcGfuGfcGfgUfuGfaAfgAfasusu |
| siRNA 4310/4344 | 4310 | uucuUfCfaaCfCfgcacgacgasusu | 4344 | ucgUfcGfuGfcGfgUfuGfaAfgAfasusu |
| siRNA 4311/4345 | 4311 | ucuucaaCfCfgCfacgacggasusu | 4345 | uccGfuCfgUfgCfgGfuUfgAfaGfasusu |
| siRNA 4312/4345 | 4312 | ucuuCfaacCfgCfacgacggasusu | 4345 | uccGfuCfgUfgCfgGfuUfgAfaGfasusu |
| siRNA 4313/4345 | 4313 | ucuuCfaaCfCfgcacgacggasusu | 4345 | uccGfuCfgUfgCfgGfuUfgAfaGfasusu |
| siRNA 4314/4345 | 4314 | ucuuCfaaCfCfgCfacgacggasusu | 4345 | uccGfuCfgUfgCfgGfuUfgAfaGfasusu |
| siRNA 4678/4346 | 4678 | uucggCfaUfCfgagaaguacasusu | 4346 | uguAfcUfuCfuCfgAfuGfcCfgAfasusu |
| siRNA 4679/4347 | 4679 | aucgagaAfGfuAfcaucccgasusu | 4347 | ucgGfgAfuGfuAfcUfuCfuCfgAfususu |
| siRNA 4680/4347 | 4680 | aucgagAfaGfuAfcaucccgasusu | 4347 | ucgGfgAfuGfuAfcUfuCfuCfgAfususu |
| siRNA 4681/4347 | 4681 | aucgaGfaaGfuAfcaucccgasusu | 4347 | ucgGfgAfuGfuAfcUfuCfuCfgAfususu |
| siRNA 4682/4347 | 4682 | aucgaGfaAfGfuacaucccgasusu | 4347 | ucgGfgAfuGfuAfcUfuCfuCfgAfususu |
| siRNA 4683/4347 | 4683 | aucgaGfaAfGfuAfcaucccgasusu | 4347 | ucgGfgAfuGfuAfcUfuCfuCfgAfususu |
| siRNA 4684/4347 | 4684 | aucgaGfAfaGfuacaucccgasusu | 4347 | ucgGfgAfuGfuAfcUfuCfuCfgAfususu |
| siRNA 4685/4347 | 4685 | aucgaGfAfaGfuAfcaucccgasusu | 4347 | ucgGfgAfuGfuAfcUfuCfuCfgAfususu |
| siRNA 4686/4347 | 4686 | aucgaGfAfAfGfuacaucccgasusu | 4347 | ucgGfgAfuGfuAfcUfuCfuCfgAfususu |
| siRNA 4687/4347 | 4687 | aucgaGfAfAfGfuAfcaucccgasusu | 4347 | ucgGfgAfuGfuAfcUfuCfuCfgAfususu |
| siRNA 4688/4347 | 4688 | aucgAfgaaGfuAfcaucccgasusu | 4347 | ucgGfgAfuGfuAfcUfuCfuCfgAfususu |
| siRNA 4689/4347 | 4689 | aucgAfgaAfGfuacaucccgasusu | 4347 | ucgGfgAfuGfuAfcUfuCfuCfgAfususu |
| siRNA 4690/4347 | 4690 | aucgAfgaAfGfuAfcaucccgasusu | 4347 | ucgGfgAfuGfuAfcUfuCfuCfgAfususu |
| siRNA 4691/4347 | 4691 | aucgAfgAfaGfuacaucccgasusu | 4347 | ucgGfgAfuGfuAfcUfuCfuCfgAfususu |
| siRNA 4692/4347 | 4692 | aucgAfgAfaGfuAfcaucccgasusu | 4347 | ucgGfgAfuGfuAfcUfuCfuCfgAfususu |
| siRNA 4693/4347 | 4693 | aucgAfGfaaGfuacaucccgasusu | 4347 | ucgGfgAfuGfuAfcUfuCfuCfgAfususu |
| siRNA 4694/4347 | 4694 | aucgAfGfaaGfuAfcaucccgasusu | 4347 | ucgGfgAfuGfuAfcUfuCfuCfgAfususu |
| siRNA 4695/4347 | 4695 | aucgAfGfaAfGfuacaucccgasusu | 4347 | ucgGfgAfuGfuAfcUfuCfuCfgAfususu |
| siRNA 4696/4347 | 4696 | aucgAfGfaAfGfuAfcaucccgasusu | 4347 | ucgGfgAfuGfuAfcUfuCfuCfgAfususu |
| siRNA 4697/4347 | 4697 | aucgAfGfAfAfGfuacaucccgasusu | 4347 | ucgGfgAfuGfuAfcUfuCfuCfgAfususu |
| siRNA 4698/4348 | 4698 | ucgagaagUfaCfaucccguasusu | 4348 | uacGfgGfaUfgUfaCfuUfcUfcGfasusu |
| siRNA 4315/4348 | 4315 | ucgaGfaAfGfdTaCfaucccguasusu | 4348 | uacGfgGfaUfgUfaCfuUfcUfcGfasusu |
| siRNA 4699/4349 | 4699 | gaaguaCfaUfcCfcguacacasusu | 4349 | uguGfuAfcGfgGfaUfgUfaCfuUfcsusu |
| siRNA 4700/4349 | 4700 | gaaguaCfaUfCfccguacacasusu | 4349 | uguGfuAfcGfgGfaUfgUfaCfuUfcsusu |
| siRNA 4701/4349 | 4701 | gaagUfacaUfcCfcguacacasusu | 4349 | uguGfuAfcGfgGfaUfgUfaCfuUfcsusu |
| siRNA 4702/4349 | 4702 | gaagUfacaUfCfccguacacasusu | 4349 | uguGfuAfcGfgGfaUfgUfaCfuUfcsusu |
| siRNA 4703/4349 | 4703 | gaagUfaCfaUfcccguacacasusu | 4349 | uguGfuAfcGfgGfaUfgUfaCfuUfcsusu |
| siRNA 4704/4349 | 4704 | gaagUfaCfaUfcCfcguacacasusu | 4349 | uguGfuAfcGfgGfaUfgUfaCfuUfcsusu |
| siRNA 4705/4349 | 4705 | gaagUfaCfaUfCfccguacacasusu | 4349 | uguGfuAfcGfgGfaUfgUfaCfuUfcsusu |
| siRNA 4316/4350 | 4316 | ucuguGfccGfGfcuacuucgasusu | 4350 | ucgAfaGfuAfgCfcGfgCfaCfaGfasusu |
| siRNA 4706/4351 | 4706 | cuacuucGfAfcugcaagucasusu | 4351 | ugaCfuUfgCfaGfuCfgAfaGfuAfgsusu |
| siRNA 4317/4351 | 4317 | cuacUfuCfGfdAcugcaagucasusu | 4351 | ugaCfuUfgCfaGfuCfgAfaGfuAfgsusu |
| siRNA 4707/4352 | 4707 | acuucgaCfUfgCfaaguccgasusu | 4352 | ucgGfaCfuUfgCfaGfuCfgAfaGfususu |
| siRNA 4708/4352 | 4708 | acuuCfgacUfgCfaaguccgasusu | 4352 | ucgGfaCfuUfgCfaGfuCfgAfaGfususu |
| siRNA 4709/4352 | 4709 | acuuCfgaCfUfgcaaguccgasusu | 4352 | ucgGfaCfuUfgCfaGfuCfgAfaGfususu |
| siRNA 4710/4352 | 4710 | acuuCfgaCfUfgCfaaguccgasusu | 4352 | ucgGfaCfuUfgCfaGfuCfgAfaGfususu |
| siRNA 4318/4353 | 4318 | uucgaCfUfgCfaaguccgacasusu | 4353 | uguCfgGfaCfuUfgCfaGfuCfgAfasusu |
| siRNA 4711/4354 | 4711 | uuaccucuAfcGfgcaucauasusu | 4354 | uauGfaUfgCfcGfuAfgAfgGfuAfasusu |
| siRNA 4319/4354 | 4319 | uuacCfuCfUfdAcGfgcaucauasusu | 4354 | uauGfaUfgCfcGfuAfgAfgGfuAfasusu |

[0287] Therapeutic siRNAs were designed to target human HGFAC as described above and, in some cases, the HGFAC sequence of at least one toxicology-relevant species, in this case, the mouse. The siRNAs included in subset H have the following characteristics and are shown in Table H:
[0288] Cross-reactivity: With 19mer in human HGFAC mRNA, with 17mer (pos. 2-18) in mouse HGFAC, allowing for one mismatch
[0289] Specificity category: For human: AS4 or better, SS4 or better. For mouse: AS4 or better, SS4 or better.
[0290] SNPs: siRNA target sites do not harbor SNPs with a MAF≥10% (pos. 2-18)

TABLE H
Subset H siRNAs

| | SEQ | Sense strand | SEQ | Antisense strand |
|---|---|---|---|---|
| siRNA | ID | sequence | ID | sequence |
| Name | NO: | (5′-3′) | NO: | (5′-3′) |
| siRNA 625 | 625 | CGGCACAGAGAAAUGCUUU | 2676 | AAAGCAUUUCUCUGUGCCG |
| siRNA 626 | 626 | GGCACAGAGAAAUGCUUUG | 2677 | CAAAGCAUUUCUCUGUGCC |
| siRNA 627 | 627 | GCACAGAGAAAUGCUUUGA | 2678 | UCAAAGCAUUUCUCUGUGC |
| siRNA 628 | 628 | CACAGAGAAAUGCUUUGAU | 2679 | AUCAAAGCAUUUCUCUGUG |
| siRNA 629 | 629 | ACAGAGAAAUGCUUUGAUG | 2680 | CAUCAAAGCAUUUCUCUGU |
| siRNA 630 | 630 | CAGAGAAAUGCUUUGAUGA | 2681 | UCAUCAAAGCAUUUCUCUG |
| siRNA 631 | 631 | AGAGAAAUGCUUUGAUGAG | 2682 | CUCAUCAAAGCAUUUCUCU |
| siRNA 634 | 634 | GAAAUGCUUUGAUGAGACC | 2685 | GGUCUCAUCAAAGCAUUUC |
| siRNA 757 | 757 | ACAUACAGCUUGUCUGAGC | 2808 | GCUCAGACAAGCUGUAUGU |
| siRNA 1533 | 1533 | UGAUCCGGCUGAAGAAGAA | 3584 | UUCUUCUUCAGCCGGAUCA |
| siRNA 1534 | 1534 | GAUCCGGCUGAAGAAGAAA | 3585 | UUUCUUCUUCAGCCGGAUC |
| siRNA 1627 | 1627 | AGGACACAAGUGCCAGAUU | 3678 | AAUCUGGCACUUGUGUCCU |
| siRNA 1938 | 1938 | CCAACUAUGUGGACUGGAU | 3989 | AUCCAGUCCACAUAGUUGG |
| siRNA 1939 | 1939 | CAACUAUGUGGACUGGAUC | 3990 | GAUCCAGUCCACAUAGUUG |
| siRNA 1942 | 1942 | CUAUGUGGACUGGAUCAAC | 3993 | GUUGAUCCAGUCCACAUAG |
| siRNA 1943 | 1943 | UAUGUGGACUGGAUCAACG | 3994 | CGUUGAUCCAGUCCACAUA |
| siRNA 1944 | 1944 | AUGUGGACUGGAUCAACGA | 3995 | UCGUUGAUCCAGUCCACAU |

[0291] In some cases, the sense strand of any of the siRNAs of subset H comprises siRNA with a particular modification pattern. In this modification pattern, position 9 counting from the 5′ end of the of the sense strand is has the 2′F modification. If position 9 of the sense strand is a pyrimidine, then all purines in the sense strand have the 2′OMe modification. If position 9 is the only pyrimidine between positions 5 and 11 of the sense stand, then position 9 is the only position with the 2′F modification in the sense strand. If position 9 and only one other base between positions 5 and 11 of the sense strand are pyrimidines, then both of these pyrimidines are the only two positions with the 2′F modification in the sense strand. If position 9 and only two other bases between positions 5 and 11 of the sense strand are pyrimidines, and those two other pyrimidines are in adjacent positions so that there would be not three 2′F modifications in a row, then any combination of 2′F modifications can be made that give three 2′F modifications in total. If there are >2 pyrimidines between positions 5 and 11 of the sense strand, then all combinations of pyrimidines having the 2′F modification are allowed that have three to five 2′F modifications in total, provided that the sense strand does not have three 2′F modifications in a row.

[0292] If position 9 of the sense strand is a purine, then all purines in the sense strand have the 2′OMe modification. If position 9 is the only purine between positions 5 and 11 of the sense stand, then position 9 is the only position with the 2′F modification in the sense strand. If position 9 and only one other base between positions 5 and 11 of the sense strand are purines, then both of these purines are the only two positions with the 2′F modification in the sense strand. If position 9 and only two other bases between positions 5 and 11 of the sense strand are purines, and those two other purines are in adjacent positions so that there would be not three 2′F modifications in a row, then any combination of 2′F modifications can be made that give three 2′F modifications in total. If there are >2 purines between positions 5 and 11 of the sense strand, then all combinations of purines having the 2′F modification are allowed that have three to five 2′F modifications in total, provided that the sense strand does not have three 2′F modifications in a row.

[0293] In some cases, the sense strand of any of the siRNAs of subset H comprises a modification pattern which conforms to these sense strand rules. In some cases, a 2′ deoxy substitution may be used in sense strand (see, e.g., Table H(2)).

[0294] In some cases, the antisense strand of any of the siRNAs of subset H comprises modification pattern 3AS (see, e.g., Table H(2)). The siRNAs in subset H may comprise any other modification pattern(s).

TABLE H(2)
Modified Subset G siRNAs

| | SEQ | | SEQ | |
|---|---|---|---|---|
| | ID | | ID | |
| siRNA Name | NO: | Sense strand sequence (5′-3′) | NO: | Antisense strand sequence (5′-3′) |
| siRNA 4355/4483 | 4355 | cggcacaGfAfgAfaaugcuuasusu | 4483 | usAfsaGfcAfuUfuCfuCfuGfuGfcCfgsusu |
| siRNA 4356/4483 | 4356 | cggcacaGfAfGfAfaaugcuuasusu | 4483 | usAfsaGfcAfuUfuCfuCfuGfuGfcCfgsusu |
| siRNA 4357/4483 | 4357 | cggcacAfgAfgAfaaugcuuasusu | 4483 | usAfsaGfcAfuUfuCfuCfuGfuGfcCfgsusu |
| siRNA 4358/4483 | 4358 | cggcacAfgAfGfaaaugcuuasusu | 4483 | usAfsaGfcAfuUfuCfuCfuGfuGfcCfgsusu |
| siRNA 4359/4483 | 4359 | cggcacAfGfAfGfaaaugcuuasusu | 4483 | usAfsaGfcAfuUfuCfuCfuGfuGfcCfgsusu |
| siRNA 4360/4483 | 4360 | cggcacAfGfAfGfAfaaugcuuasusu | 4483 | usAfsaGfcAfuUfuCfuCfuGfuGfcCfgsusu |
| siRNA 4361/4483 | 4361 | cggcAfcagAfgAfaaugcuuasusu | 4483 | usAfsaGfcAfuUfuCfuCfuGfuGfcCfgsusu |
| siRNA 4362/4483 | 4362 | cggcAfcagAfGfaaaugcuuasusu | 4483 | usAfsaGfcAfuUfuCfuCfuGfuGfcCfgsusu |
| siRNA 4363/4483 | 4363 | cggcAfcaGfAfgaaaugcuuasusu | 4483 | usAfsaGfcAfuUfuCfuCfuGfuGfcCfgsusu |
| siRNA 4364/4483 | 4364 | cggcAfcaGfAfgAfaaugcuuasusu | 4483 | usAfsaGfcAfuUfuCfuCfuGfuGfcCfgsusu |
| siRNA 4365/4483 | 4365 | cggcAfcaGfAfGfAfaaugcuuasusu | 4483 | usAfsaGfcAfuUfuCfuCfuGfuGfcCfgsusu |
| siRNA 4366/4483 | 4366 | cggcAfcAfgAfgaaaugcuuasusu | 4483 | usAfsaGfcAfuUfuCfuCfuGfuGfcCfgsusu |
| siRNA 4367/4483 | 4367 | cggcAfcAfgAfgAfaaugcuuasusu | 4483 | usAfsaGfcAfuUfuCfuCfuGfuGfcCfgsusu |
| siRNA 4368/4483 | 4368 | cggcAfcAfgAfGfaaaugcuuasusu | 4483 | usAfsaGfcAfuUfuCfuCfuGfuGfcCfgsusu |
| siRNA 4369/4483 | 4369 | cggcAfcAfGfAfGfaaaugcuuasusu | 4483 | usAfsaGfcAfuUfuCfuCfuGfuGfcCfgsusu |
| siRNA 4370/4484 | 4370 | ggcacagAfGfaAfaugcuuuasusu | 4484 | usAfsaAfgCfaUfuUfcUfcUfgUfgCfcsusu |
| siRNA 4371/4484 | 4371 | ggcacagAfGfAfAfaugcuuuasusu | 4484 | usAfsaAfgCfaUfuUfcUfcUfgUfgCfcsusu |
| siRNA 4372/4484 | 4372 | ggcacaGfaGfaAfaugcuuuasusu | 4484 | usAfsaAfgCfaUfuUfcUfcUfgUfgCfcsusu |
| siRNA 4373/4484 | 4373 | ggcacaGfaGfAfaaugcuuuasusu | 4484 | usAfsaAfgCfaUfuUfcUfcUfgUfgCfcsusu |
| siRNA 4374/4484 | 4374 | ggcacaGfAfGfAfaaugcuuuasusu | 4484 | usAfsaAfgCfaUfuUfcUfcUfgUfgCfcsusu |
| siRNA 4375/4484 | 4375 | ggcacaGfAfGfAfAfaugcuuuasusu | 4484 | usAfsaAfgCfaUfuUfcUfcUfgUfgCfcsusu |
| siRNA 4376/4484 | 4376 | ggcacAfgaGfaAfaugcuuuasusu | 4484 | usAfsaAfgCfaUfuUfcUfcUfgUfgCfcsusu |
| siRNA 4377/4484 | 4377 | ggcacAfgaGfAfaaugcuuuasusu | 4484 | usAfsaAfgCfaUfuUfcUfcUfgUfgCfcsusu |
| siRNA 4378/4484 | 4378 | ggcacAfgAfGfaaaugcuuuasusu | 4484 | usAfsaAfgCfaUfuUfcUfcUfgUfgCfcsusu |
| siRNA 4379/4484 | 4379 | ggcacAfgAfGfaAfaugcuuuasusu | 4484 | usAfsaAfgCfaUfuUfcUfcUfgUfgCfcsusu |
| siRNA 4380/4484 | 4380 | ggcacAfgAfGfAfAfaugcuuuasusu | 4484 | usAfsaAfgCfaUfuUfcUfcUfgUfgCfcsusu |
| siRNA 4381/4484 | 4381 | ggcacAfGfaGfaaaugcuuuasusu | 4484 | usAfsaAfgCfaUfuUfcUfcUfgUfgCfcsusu |
| siRNA 4382/4484 | 4382 | ggcacAfGfaGfaAfaugcuuuasusu | 4484 | usAfsaAfgCfaUfuUfcUfcUfgUfgCfcsusu |
| siRNA 4383/4484 | 4383 | ggcacAfGfaGfAfaaugcuuuasusu | 4484 | usAfsaAfgCfaUfuUfcUfcUfgUfgCfcsusu |
| siRNA 4384/4484 | 4384 | ggcacAfGfAfGfaaaugcuuuasusu | 4484 | usAfsaAfgCfaUfuUfcUfcUfgUfgCfcsusu |
| siRNA 4385/4484 | 4385 | ggcacAfGfAfGfaAfaugcuuuasusu | 4484 | usAfsaAfgCfaUfuUfcUfcUfgUfgCfcsusu |
| siRNA 4386/4484 | 4386 | ggcacAfGfAfGfAfaaugcuuuasusu | 4484 | usAfsaAfgCfaUfuUfcUfcUfgUfgCfcsusu |
| siRNA 4387/4485 | 4387 | gcacagaGfAfaAfugcuuugasusu | 4485 | usCfsaAfaGfcAfuUfuCfuCfuGfuGfcsusu |
| siRNA 4388/4485 | 4388 | gcacagaGfAfAfAfugcuuugasusu | 4485 | usCfsaAfaGfcAfuUfuCfuCfuGfuGfcsusu |
| siRNA 4389/4485 | 4389 | gcacagAfgAfaAfugcuuugasusu | 4485 | usCfsaAfaGfcAfuUfuCfuCfuGfuGfcsusu |
| siRNA 4390/4485 | 4390 | gcacagAfgAfAfaugcuuugasusu | 4485 | usCfsaAfaGfcAfuUfuCfuCfuGfuGfcsusu |
| siRNA 4391/4485 | 4391 | gcacagAfGfAfAfaugcuuugasusu | 4485 | usCfsaAfaGfcAfuUfuCfuCfuGfuGfcsusu |
| siRNA 4392/4485 | 4392 | gcacagAfGfAfAfAfugcuuugasusu | 4485 | usCfsaAfaGfcAfuUfuCfuCfuGfuGfcsusu |
| siRNA 4393/4485 | 4393 | gcacaGfagAfaAfugcuuugasusu | 4485 | usCfsaAfaGfcAfuUfuCfuCfuGfuGfcsusu |
| siRNA 4394/4485 | 4394 | gcacaGfagAfAfaugcuuugasusu | 4485 | usCfsaAfaGfcAfuUfuCfuCfuGfuGfcsusu |
| siRNA 4395/4485 | 4395 | gcacaGfaGfAfaaugcuuugasusu | 4485 | usCfsaAfaGfcAfuUfuCfuCfuGfuGfcsusu |
| siRNA 4396/4485 | 4396 | gcacaGfaGfAfaAfugcuuugasusu | 4485 | usCfsaAfaGfcAfuUfuCfuCfuGfuGfcsusu |
| siRNA 4397/4485 | 4397 | gcacaGfaGfAfAfAfugcuuugasusu | 4485 | usCfsaAfaGfcAfuUfuCfuCfuGfuGfcsusu |
| siRNA 4398/4485 | 4398 | gcacaGfAfgAfaaugcuuugasusu | 4485 | usCfsaAfaGfcAfuUfuCfuCfuGfuGfcsusu |
| siRNA 4399/4485 | 4399 | gcacaGfAfgAfaAfugcuuugasusu | 4485 | usCfsaAfaGfcAfuUfuCfuCfuGfuGfcsusu |
| siRNA 4400/4485 | 4400 | gcacaGfAfgAfAfaugcuuugasusu | 4485 | usCfsaAfaGfcAfuUfuCfuCfuGfuGfcsusu |
| siRNA 4401/4485 | 4401 | gcacaGfAfGfAfaaugcuuugasusu | 4485 | usCfsaAfaGfcAfuUfuCfuCfuGfuGfcsusu |
| siRNA 4402/4485 | 4402 | gcacaGfAfGfAfaAfugcuuugasusu | 4485 | usCfsaAfaGfcAfuUfuCfuCfuGfuGfcsusu |
| siRNA 4403/4485 | 4403 | gcacaGfAfGfAfAfaugcuuugasusu | 4485 | usCfsaAfaGfcAfuUfuCfuCfuGfuGfcsusu |
| siRNA 4404/4485 | 4404 | gcacAfgagAfaAfugcuuugasusu | 4485 | usCfsaAfaGfcAfuUfuCfuCfuGfuGfcsusu |
| siRNA 4405/4485 | 4405 | gcacAfgagAfAfaugcuuugasusu | 4485 | usCfsaAfaGfcAfuUfuCfuCfuGfuGfcsusu |
| siRNA 4406/4485 | 4406 | gcacAfgaGfAfaaugcuuugasusu | 4485 | usCfsaAfaGfcAfuUfuCfuCfuGfuGfcsusu |
| siRNA 4407/4485 | 4407 | gcacAfgaGfAfaAfugcuuugasusu | 4485 | usCfsaAfaGfcAfuUfuCfuCfuGfuGfcsusu |
| siRNA 4408/4485 | 4408 | gcacAfgaGfAfAfAfugcuuugasusu | 4485 | usCfsaAfaGfcAfuUfuCfuCfuGfuGfcsusu |
| siRNA 4409/4485 | 4409 | gcacAfgAfgAfaaugcuuugasusu | 4485 | usCfsaAfaGfcAfuUfuCfuCfuGfuGfcsusu |
| siRNA 4410/4485 | 4410 | gcacAfgAfgAfaAfugcuuugasusu | 4485 | usCfsaAfaGfcAfuUfuCfuCfuGfuGfcsusu |
| siRNA 4411/4485 | 4411 | gcacAfgAfgAfAfaugcuuugasusu | 4485 | usCfsaAfaGfcAfuUfuCfuCfuGfuGfcsusu |
| siRNA 4412/4485 | 4412 | gcacAfgAfGfAfAfaugcuuugasusu | 4485 | usCfsaAfaGfcAfuUfuCfuCfuGfuGfcsusu |
| siRNA 4413/4485 | 4413 | gcacAfGfagAfaaugcuuugasusu | 4485 | usCfsaAfaGfcAfuUfuCfuCfuGfuGfcsusu |
| siRNA 4414/4485 | 4414 | gcacAfGfagAfaAfugcuuugasusu | 4485 | usCfsaAfaGfcAfuUfuCfuCfuGfuGfcsusu |
| siRNA 4415/4485 | 4415 | gcacAfGfagAfAfaugcuuugasusu | 4485 | usCfsaAfaGfcAfuUfuCfuCfuGfuGfcsusu |
| siRNA 4416/4485 | 4416 | gcacAfGfaGfAfaaugcuuugasusu | 4485 | usCfsaAfaGfcAfuUfuCfuCfuGfuGfcsusu |
| siRNA 4417/4485 | 4417 | gcacAfGfaGfAfaAfugcuuugasusu | 4485 | usCfsaAfaGfcAfuUfuCfuCfuGfuGfcsusu |
| siRNA 4418/4485 | 4418 | gcacAfGfAfGfAfaaugcuuugasusu | 4485 | usCfsaAfaGfcAfuUfuCfuCfuGfuGfcsusu |
| siRNA 4419/4486 | 4419 | cacagaGfaAfAfugcuuugaasusu | 4486 | usUfscAfaAfgCfaUfuUfcUfcUfgUfgsusu |
| siRNA 4420/4486 | 4420 | cacagaGfAfAfAfugcuuugaasusu | 4486 | usUfscAfaAfgCfaUfuUfcUfcUfgUfgsusu |
| siRNA 4421/4486 | 4421 | cacagAfgaAfAfugcuuugaasusu | 4486 | usUfscAfaAfgCfaUfuUfcUfcUfgUfgsusu |
| siRNA 4422/4486 | 4422 | cacagAfgAfAfaugcuuugaasusu | 4486 | usUfscAfaAfgCfaUfuUfcUfcUfgUfgsusu |
| siRNA 4423/4486 | 4423 | cacagAfGfaAfaugcuuugaasusu | 4486 | usUfscAfaAfgCfaUfuUfcUfcUfgUfgsusu |
| siRNA 4424/4486 | 4424 | cacagAfGfaAfAfugcuuugaasusu | 4486 | usUfscAfaAfgCfaUfuUfcUfcUfgUfgsusu |
| siRNA 4425/4486 | 4425 | cacagAfGfAfAfaugcuuugaasusu | 4486 | usUfscAfaAfgCfaUfuUfcUfcUfgUfgsusu |
| siRNA 4426/4486 | 4426 | cacagAfGfAfAfAfugcuuugaasusu | 4486 | usUfscAfaAfgCfaUfuUfcUfcUfgUfgsusu |
| siRNA 4427/4486 | 4427 | cacaGfagaAfAfugcuuugaasusu | 4486 | usUfscAfaAfgCfaUfuUfcUfcUfgUfgsusu |
| siRNA 4428/4486 | 4428 | cacaGfagAfAfaugcuuugaasusu | 4486 | usUfscAfaAfgCfaUfuUfcUfcUfgUfgsusu |
| siRNA 4429/4486 | 4429 | cacaGfaGfaAfaugcuuugaasusu | 4486 | usUfscAfaAfgCfaUfuUfcUfcUfgUfgsusu |
| siRNA 4430/4486 | 4430 | cacaGfaGfaAfAfugcuuugaasusu | 4486 | usUfscAfaAfgCfaUfuUfcUfcUfgUfgsusu |
| siRNA 4431/4486 | 4431 | cacaGfaGfAfAfAfugcuuugaasusu | 4486 | usUfscAfaAfgCfaUfuUfcUfcUfgUfgsusu |
| siRNA 4432/4486 | 4432 | cacaGfAfgaAfaugcuuugaasusu | 4486 | usUfscAfaAfgCfaUfuUfcUfcUfgUfgsusu |
| siRNA 4433/4486 | 4433 | cacaGfAfgaAfAfugcuuugaasusu | 4486 | usUfscAfaAfgCfaUfuUfcUfcUfgUfgsusu |
| siRNA 4434/4486 | 4434 | cacaGfAfgAfAfaugcuuugaasusu | 4486 | usUfscAfaAfgCfaUfuUfcUfcUfgUfgsusu |
| siRNA 4435/4486 | 4435 | cacaGfAfGfAfAfaugcuuugaasusu | 4486 | usUfscAfaAfgCfaUfuUfcUfcUfgUfgsusu |
| siRNA 4436/4487 | 4436 | acagagaAfAfuGfcuuugauasusu | 4487 | usAfsuCfaAfaGfcAfuUfuCfuCfuGfususu |
| siRNA 4437/4487 | 4437 | acagagAfaAfuGfcuuugauasusu | 4487 | usAfsuCfaAfaGfcAfuUfuCfuCfuGfususu |
| siRNA 4438/4487 | 4438 | acagaGfaaAfuGfcuuugauasusu | 4487 | usAfsuCfaAfaGfcAfuUfuCfuCfuGfususu |
| siRNA 4439/4487 | 4439 | acagaGfaAfAfugcuuugauasusu | 4487 | usAfsuCfaAfaGfcAfuUfuCfuCfuGfususu |
| siRNA 4440/4487 | 4440 | acagaGfaAfAfuGfcuuugauasusu | 4487 | usAfsuCfaAfaGfcAfuUfuCfuCfuGfususu |
| siRNA 4441/4487 | 4441 | acagaGfAfaAfugcuuugauasusu | 4487 | usAfsuCfaAfaGfcAfuUfuCfuCfuGfususu |
| siRNA 4442/4487 | 4442 | acagaGfAfaAfuGfcuuugauasusu | 4487 | usAfsuCfaAfaGfcAfuUfuCfuCfuGfususu |
| siRNA 4443/4487 | 4443 | acagaGfAfAfAfugcuuugauasusu | 4487 | usAfsuCfaAfaGfcAfuUfuCfuCfuGfususu |
| siRNA 4444/4487 | 4444 | acagaGfAfAfAfuGfcuuugauasusu | 4487 | usAfsuCfaAfaGfcAfuUfuCfuCfuGfususu |
| siRNA 4445/4487 | 4445 | acagAfgaaAfuGfcuuugauasusu | 4487 | usAfsuCfaAfaGfcAfuUfuCfuCfuGfususu |
| siRNA 4446/4487 | 4446 | acagAfgaAfAfugcuuugauasusu | 4487 | usAfsuCfaAfaGfcAfuUfuCfuCfuGfususu |
| siRNA 4447/4487 | 4447 | acagAfgaAfAfuGfcuuugauasusu | 4487 | usAfsuCfaAfaGfcAfuUfuCfuCfuGfususu |
| siRNA 4448/4487 | 4448 | acagAfgAfaAfugcuuugauasusu | 4487 | usAfsuCfaAfaGfcAfuUfuCfuCfuGfususu |
| siRNA 4449/4487 | 4449 | acagAfgAfaAfuGfcuuugauasusu | 4487 | usAfsuCfaAfaGfcAfuUfuCfuCfuGfususu |
| siRNA 4450/4487 | 4450 | acagAfGfaaAfugcuuugauasusu | 4487 | usAfsuCfaAfaGfcAfuUfuCfuCfuGfususu |
| siRNA 4451/4487 | 4451 | acagAfGfaaAfuGfcuuugauasusu | 4487 | usAfsuCfaAfaGfcAfuUfuCfuCfuGfususu |
| siRNA 4452/4487 | 4452 | acagAfGfaAfAfugcuuugauasusu | 4487 | usAfsuCfaAfaGfcAfuUfuCfuCfuGfususu |
| siRNA 4453/4487 | 4453 | acagAfGfaAfAfuGfcuuugauasusu | 4487 | usAfsuCfaAfaGfcAfuUfuCfuCfuGfususu |
| siRNA 4454/4487 | 4454 | acagAfGfAfAfAfugcuuugauasusu | 4487 | usAfsuCfaAfaGfcAfuUfuCfuCfuGfususu |
| siRNA 4455/4488 | 4455 | cagagaaaUfgCfuuugaugasusu | 4488 | usCfsaUfcAfaAfgCfaUfuUfcUfcUfgsusu |
| siRNA 4456/4488 | 4456 | cagaGfaAfAfdTgCfuuugaugasusu | 4488 | usCfsaUfcAfaAfgCfaUfuUfcUfcUfgsusu |
| siRNA 4457/4489 | 4457 | agagaAfAfuGfcuuugaugaasusu | 4489 | usUfscAfuCfaAfaGfcAfuUfuCfuCfususu |
| siRNA 4458/4489 | 4458 | agagAfaAfuGfcuuugaugaasusu | 4489 | usUfscAfuCfaAfaGfcAfuUfuCfuCfususu |
| siRNA 4459/4489 | 4459 | agagAfAfauGfcuuugaugaasusu | 4489 | usUfscAfuCfaAfaGfcAfuUfuCfuCfususu |
| siRNA 4460/4490 | 4460 | gaaaugCfuUfUfgaugagacasusu | 4490 | usGfsuCfuCfaUfcAfaAfgCfaUfuUfcsusu |
| siRNA 4461/4490 | 4461 | gaaaugCfUfUfUfgaugagacasusu | 4490 | usGfsuCfuCfaUfcAfaAfgCfaUfuUfcsusu |
| siRNA 4462/4490 | 4462 | gaaaUfgcuUfUfgaugagacasusu | 4490 | usGfsuCfuCfaUfcAfaAfgCfaUfuUfcsusu |
| siRNA 4463/4490 | 4463 | gaaaUfgcUfUfugaugagacasusu | 4490 | usGfsuCfuCfaUfcAfaAfgCfaUfuUfcsusu |
| siRNA 4464/4490 | 4464 | gaaaUfgCfuUfugaugagacasusu | 4490 | usGfsuCfuCfaUfcAfaAfgCfaUfuUfcsusu |
| siRNA 4465/4490 | 4465 | gaaaUfgCfuUfUfgaugagacasusu | 4490 | usGfsuCfuCfaUfcAfaAfgCfaUfuUfcsusu |
| siRNA 4466/4490 | 4466 | gaaaUfgCfUfUfUfgaugagacasusu | 4490 | usGfsuCfuCfaUfcAfaAfgCfaUfuUfcsusu |
| siRNA 4467/4491 | 4467 | acauaCfagCfuUfgucugagasusu | 4491 | usCfsuCfaGfaCfaAfgCfuGfuAfuGfususu |
| siRNA 4468/4491 | 4468 | acauaCfagCfUfugucugagasusu | 4491 | usCfsuCfaGfaCfaAfgCfuGfuAfuGfususu |
| siRNA 4469/4492 | 4469 | ugaucCfggCfUfgaagaagaasusu | 4492 | usUfscUfuCfuUfcAfgCfcGfgAfuCfasusu |
| siRNA 4470/4492 | 4470 | ugauCfcggCfUfgaagaagaasusu | 4492 | usUfscUfuCfuUfcAfgCfcGfgAfuCfasusu |
| siRNA 4471/4492 | 4471 | ugauCfCfggCfugaagaagaasusu | 4492 | usUfscUfuCfuUfcAfgCfcGfgAfuCfasusu |
| siRNA 4472/4492 | 4472 | ugauCfCfggCfUfgaagaagaasusu | 4492 | usUfscUfuCfuUfcAfgCfcGfgAfuCfasusu |
| siRNA 4473/4493 | 4473 | gaucCfggCfUfgaagaagaaasusu | 4493 | usUfsuCfuUfcUfuCfaGfcCfgGfaUfcsusu |
| siRNA 4474/4494 | 4474 | aggacAfcaAfGfugccagauasusu | 4494 | usAfsuCfuGfgCfaCfuUfgUfgUfcCfususu |
| siRNA 4475/4494 | 4475 | aggacAfcAfAfgugccagauasusu | 4494 | usAfsuCfuGfgCfaCfuUfgUfgUfcCfususu |
| siRNA 4476/4495 | 4476 | ccaacuAfuGfuGfgacuggaasusu | 4495 | usUfscCfaGfuCfcAfcAfuAfgUfuGfgsusu |
| siRNA 4477/4496 | 4477 | caacUfaUfgUfggacuggauasusu | 4496 | usAfsuCfcAfgUfcCfaCfaUfaGfuUfgsusu |
| siRNA 4478/4497 | 4478 | cuauGfugGfAfcuggaucaaasusu | 4497 | usUfsuGfaUfcCfaGfuCfcAfcAfuAfgsusu |
| siRNA 4479/4497 | 4479 | cuauGfuGfgAfcuggaucaaasusu | 4497 | usUfsuGfaUfcCfaGfuCfcAfcAfuAfgsusu |
| siRNA 4480/4498 | 4480 | uaugUfggaCfUfggaucaacasusu | 4498 | usGfsuUfgAfuCfcAfgUfcCfaCfaUfasusu |
| siRNA 4481/4499 | 4481 | auguggaCfUfggaucaacgasusu | 4499 | usCfsgUfuGfaUfcCfaGfuCfcAfcAfususu |
| siRNA 4482/4499 | 4482 | auguGfgAfCfdTggaucaacgasusu | 4499 | usCfsgUfuGfaUfcCfaGfuCfcAfcAfususu |

### Example 3: siRNA-Mediated Knockdown of HGFAC in HepG2 Cell Line

[0295] siRNAs targeted to HGFAC mRNA that downregulate levels of HGFAC mRNA are expected to lead to a decrease in HGFAC activation when administered to the cultured human hepatocyte cell line, HepG2.

[0296] On Day 0, the HepG2 cells are seeded at 150,000 cells/mL into a Falcon 24-well tissue culture plate (ThermoFisher Cat. No. 353047) at 0.5 mL per well.

[0297] On Day 1, the HGFAC siRNA and negative control siRNA master mixes are prepared. The HGFAC siRNA master mix contains 350 μL of Opti-MEM (ThermoFisher Cat. No. 4427037-s1288 Lot No. AS02B02D) and 3.5 μL of a mixture of two HGFAC siRNAs (10 μM stock). The negative control siRNA master mix contains 350 μL of Opti-MEM and 3.5 μL of negative control siRNA (ThermoFisher Cat. No. 4390843, 10 μM stock). Next, 3 μL of TransIT-X2 (Mirus Cat. No. MIR-6000) is added to each master mix. The mixes are incubated for 15 minutes to allow transfection complexes to form, then 51 μL of the appropriate master mix+TransIT-X2 is added to duplicate wells of HepG2 cells with a final siRNA concentration of 10 nM.

[0298] On Day 4, 72 hours post transfection, the cells are lysed using the Cells-to-Ct kit according to the manufacturer's protocol (ThermoFisher Cat. No. 4399002). For the Cells-to-Ct protocol, cells are washed with 50 μL using cold 1× PBS and lysed by adding 49.5 μL of Lysis Solution and 0.5 μL DNase I per well and pipetting up and down 5 times and incubating for 5 minutes at room temperature. The Stop Solution (5 μL/well) is added to each well and mixed by pipetting up and down five times and incubating at room temperature for 2 minutes. The reverse transcriptase reaction is performed using 22.5 μL of the lysate according to the manufacturer's protocol. Samples are stored at −80° C. until real-time qPCR is performed in triplicate using TaqMan Gene Expression Assays (Applied Biosystems FAM/HGFAC using a BioRad CFX96 Cat. No. 1855195). For the protein quantification, equivalent quantities (30-50 g) of protein are separated by 10% SDS polyacrylamide gels and transferred to polyvinylidene fluoride membranes. Membranes are blocked with 5% nonfat milk and incubated overnight with the appropriate primary antibody at dilutions specified by the manufacturer. Next, the membranes are washed three times in TBST and incubated with the corresponding horseradish peroxidase conjugated secondary antibody at 1:5,000 dilution for 1 hr. Bound secondary antibody is detected using an enhanced chemiluminescence system. The primary immunoblotting antibody used is anti-HGFAC (R&D Systems Cat. No. AF1514).

[0299] A decrease in HGFAC mRNA expression in the HepG2 cells is expected after transfection with the HGFAC siRNAs compared to HGFAC mRNA levels in HepG2 cells transfected with the non-specific control siRNA 72 hours after transfection. There is also an expected decrease in the amount of activated HGFAC, measured by quantifying the total amount of pro-HGFAC relative to enzymatically active HGFAC in culture media of HepG2 cells transfected with the HGFAC siRNAs compared to the amount of pro-HGFAC relative to enzymatically active HGFAC in culture media of HepG2 cells 72 hours after transfection. These results show that the HGFAC siRNAs elicit knockdown of HGFAC mRNA in HepG2 cells and that the decrease in HGFAC expression is correlated with a decrease both pro-HGFAC and activated HGFAC.

### Example 4: ASO-Mediated Knockdown of HGFAC in HepG2 Cell Line

[0300] ASOs targeted to HGFAC mRNA that downregulate levels of HGFAC mRNA are expected to lead to a decrease in HGFAC activation when administered to the cultured human hepatocyte cell line, HepG2.

[0301] On Day 0, the HepG2 cells are seeded at 150,000 cells/mL into a Falcon 24-well tissue culture plate (ThermoFisher Cat. No. 353047) at 0.5 mL per well.

[0302] On Day 1, the HGFAC ASO and negative control ASO master mixes are prepared. The HGFAC ASO master mix contains 350 μL of Opti-MEM (ThermoFisher Cat. No. 4427037-s1288 Lot No. AS02B02D) and 3.5 μL of a mixture of two HGFAC ASOs (10 μM stock). The negative control ASO master mix contains 350 μL of Opti-MEM and 3.5 μL of negative control ASO (ThermoFisher Cat. No. 4390843, 10 μM stock). Next, 3 μL of TransIT-X2 (Mirus Cat. No. MIR-6000) is added to each master mix. The mixes are incubated for 15 minutes to allow transfection complexes to form, then 51 μL of the appropriate master mix+TransIT-X2 is added to duplicate wells of HepG2 cells with a final ASO concentration of 10 nM.

[0303] On Day 4, 72 hours post transfection, the cells are lysed using the Cells-to-Ct kit according to the manufacturer's protocol (ThermoFisher Cat. No. 4399002). For the Cells-to-Ct, cells are washed with 50 μL using cold 1× PBS and lysed by adding 49.5 μL of Lysis Solution and 0.5 μL DNase I per well and pipetting up and down 5 times and incubating for 5 minutes at room temperature. The Stop Solution (5 ul/well) is added to each well and mixed by pipetting up and down five times and incubating at room temperature for 2 minutes. The reverse transcriptase reaction is performed using 22.5 μL of the lysate according to the manufacturer's protocol. Samples are stored at −80° C. until real-time qPCR is performed in triplicate using TaqMan Gene Expression Assays (Applied Biosystems FAM/HGFAC using a BioRad CFX96 Cat. No. 1855195). For the protein quantification, equivalent quantities (30-50 g) of protein are separated by 10% SDS polyacrylamide gels and transferred to polyvinylidene fluoride membranes. Membranes are blocked with 5% nonfat milk and incubated overnight with the appropriate primary antibody at dilutions specified by the manufacturer. Next, the membranes are washed three times in TBST and incubated with the corresponding horseradish peroxidase conjugated secondary antibody at 1:5,000 dilution for 1 hr. Bound secondary antibody is detected using an enhanced chemiluminescence system. The primary immunoblotting antibody used is anti-HGFAC (R&D Systems Cat. No. AF1514).

[0304] A decrease in HGFAC mRNA expression in the HepG2 cells is expected after transfection with the HGFAC ASOs compared to HGFAC mRNA levels in HepG2 cells transfected with the non-specific control ASO 72 hours after transfection. There is also an expected decrease in the amount of activated HGFAC, measured by quantifying the total amount of pro-HGFAC relative to enzymatically active HGFAC in culture media of HepG2 cells transfected with the HGFAC ASOs compared to the amount of pro-HGFAC relative to enzymatically active HGFAC in culture media of HepG2 cells 72 hours after transfection. These results show that the HGFAC ASOs elicit knockdown of HGFAC mRNA in HepG2 cells and that the decrease in HGFAC expression is correlated with a decrease both pro-HGFAC and activated HGFAC Example 5: Inhibition of HGFAC in a mouse model of breast cancer using HGFAC siRNAs or ASOs

[0305] In this experiment, a mouse model of breast cancer is used to evaluate the effect of siRNA or ASO inhibition of HGFAC. It is hypothesized that HGFAC inhibition alone or cooperative inhibition with the approved checkpoint inhibitor anti-CTLA-4 (aCTLA-4) will result in improved anti-tumor responses relative to aCTLA-4 alone. The well-characterized MMTV-PyMT model is used to investigate this hypothesis.

[0306] To be able to track antigen-specific CD8+ T-cell responses, tumor cells are engineered to express a model antigen: specifically, a fragment of Lymphocytic Choriomeningitis Virus (LCMV) nucleoprotein that produces an immunodominant MHC-I associated peptide, NP118 (RPQASGVYM) in FVB hosts (hereafter referred to as PyMT-NP tumor cells). To investigate the immune landscape of mice in each treatment group, the frequency of CD8+ T cells will be quantified in secondary lymphoid organs and in tumor-infiltrating lymphocytes.

[0307] PyMT-NP tumor cells are orthotopically transplanted into the mammary fat pad; specifically, 20,000 PyMT-NP cells are transplanted unilaterally into the fourth inguinal mammary fat pads of 4-6 week old mice. When tumors reach 100 mm³, mice will be randomized into eight experimental groups: Group 1—a group treated with non-targeting control siRNA, Group 2—a group treated with non-targeting control ASO, Group 3—a group treated with HGFAC siRNA, Group 4—a group treated with HGFAC ASO, Group 5—a group treated with HGFAC siRNA and aCTLA-4, Group 6—a group treated with HGFAC ASO and aCTLA-4 Group 7—a group treated with aCTLA-4, Group 8—a group treated with vehicle only. Each group contains eight female mice.

[0308] Administration of siRNA or ASO is achieved with a single (day 0) 200 ul subcutaneous injection of siRNA or ASO resuspended in PBS at a concentration of 10 uM. Administration of aCTLA-4 is achieved with a twice weekly (beginning at day 0) intraperitoneal injection of antibody resuspended in DMSO at a concentration of 10 mg/kg. Twice weekly antibody injections are carried out for three weeks, and mice are sacrificed on day 24. Response to therapy is assessed using three metrics: by quantifying the CD8+ T cell response, by assessing the tumor growth rate and by determining the number and proportion of mice experiencing clinical benefit (defined as both complete or partial response to treatment). Similar to clinical response of humans to immunotherapeutics, it is expected that some subjects (mice) will not respond to immunotherapy at all, while others will experience slower tumor growth and some will experience eradication of the tumor altogether.

[0309] To assess siRNA and ASO mediated gene knockdown, mRNA is isolated from hepatic tissue placed in RNAlater solution using the PureLink kit according to the manufacturer's protocol (ThermoFisher Cat. No. 12183020). The reverse transcriptase reaction is performed according to the manufacturer's protocol. Samples are stored at −80° C. until real-time qPCR is performed in triplicate using TaqMan Gene Expression Assays (Applied Biosystems FAM/HGFAC using a BioRad CFX96 Cat. No. 1855195). A decrease in HGFAC mRNA expression in the liver tissue and circulating HGFAC protein in the blood from mice dosed with the HGFAC siRNA or ASO is expected compared to HGFAC mRNA expression in the liver tissue and circulating HGFAC protein in the blood from mice dosed with the non-specific controls.

### Example 6. Testing the Activity of HGFAC siRNAs ETD02131-ETD02253 in Mice Transfected with AAV8-TBG-h-HGFAC

[0310] The activities of siRNAs, namely ETD02131-ETD02253, were assessed. The siRNAs were attached to the GalNAc ligand ETL17 followed by a phosphorothioate linkage at the 5′ end of the sense strand. The siRNAs used in this Example are included in Table 4, where Nf is a 2′ fluoro-modified nucleoside, n is a 2′ O-methyl modified nucleoside, “d” is a 2′ deoxynucleoside, and “s” is a phosphorothioate linkage. The base sequences for each siRNA, with and without the 3′ UU extension, are shown in Table 5, ETD02131-ETD02141 were tested in part 1 of the study and ETD02242-ETD02253 were tested in part 2.

[0311] Six to eight week old female mice (C57Bl/6) were injected with 5 μL of a recombinant adeno-associated virus 8 (AAV8) vector (2.0×10E13 genome copies/mL, study part 1 or 1.8×10E13 genome copies/mL, study part 2) by the retroorbital or tail vein route. The recombinant AAV8 contained the open reading frame and the majority of the 3′UTR of the human HGFAC sequence (GenBank Accession #BC 112190) under the control of the human thyroxine binding globulin promoter in an AAV2 backbone packaged in AAV8 capsid (AAV8-TBG-h-HGFAC).

[0312] On Day 17 (study part 1) or on Day 20 (study part 2) after infection mice were given a subcutaneous injection of a single 100 μg dose of a GalNAc-conjugated siRNA or PBS as vehicle control. On Day 0 and on Days 5 and 11 after subcutaneous injection, serum was collected to assess levels of human HGFAC. The serum level of human HGFAC in each mouse was measured using the DuoSet Human HGF Activator ELISA kit (R&D Systems, Catalog #DY1514) according to the Manufacturer's instructions. The plate was analyzed on an Envision 2105 Multimode Plate Reader (PerkinElmer). The concentration of HGFAC in each mouse serum sample was calculated from the standard curve by interpolation using least squares fit (Prism version 9, Software MacKiev). The human HGFAC serum concentration at each timepoint was made relative to the level of HGFAC of each individual mouse on Day 0. Outliers were identified using Grubbs' Test. The results of part 1 of the study are shown in Table 6, and the results from part 2 are shown in Table 7.

[0313] Mice were euthanized on Day 11 and a liver sample from each was collected and placed in RNAlater (ThermoFisher Cat #AM7020) until processing. Total liver RNA was prepared by homogenizing the liver tissue in homogenization buffer (Maxwell RSC simplyRNA Tissue Kit) using a Percellys 24 tissue homogenizer (Bertin Instruments) set at 5000 rpm for two 10 second cycles. Total RNA from the lysate was purified on a Maxwell RSC 48 platform (Promega Corporation) according to the manufacturer's recommendations. Preparation of cDNA was performed using Quanta qScript cDNA SuperMix (VWR, Catalog #95048-500) according to the manufacturer's instructions. The relative levels of liver HGFAC mRNA were assessed by RT-qPCR in triplicate on a QuantStudio™ 6 Pro Real-Time PCR System using TaqMan assays for human HGFAC (ThermoFisher, assay #Hs00173526_ml) and the mouse housekeeping gene PPIA (ThermoFisher, assay #Mm02342430_g1) and PerfeCTa® qPCR FastMix®, Low ROX™ (VWR, Catalog #101419-222). Mice with undetectable hHGFAC expression were omitted from further analysis. Data were normalized to the level in animals receiving PBS. The results of part 1 of the study are shown in Table 8, and the results from part 2 are shown in Table 8.

TABLE 4
Example siRNA Sequences

| siRNA | SEQ ID | Sense Strand Sequence (5′-3′) | SEQ ID | Antisense Strand Sequence |
|---|---|---|---|---|
| Name | NO: | with GalNAc moiety | NO: | (5′-3′) |
| ETD02231 | 4500 | [ETL17]saaccuAfAfuGfccacag | 4320 | usUfscGfcUfgUfgGfcAfuUfa |
| | | cgaasusu | | GfgUfususu |
| ETD02232 | 4501 | [ETL17]sacuaUfcCfUfdGGfug | 4211 | usAfsgAfgGfuCfaCfcAfgGfa |
| | | accucuasusu | | UfaGfususu |
| ETD02233 | 4502 | [ETL17]suggugUfgCfCfaCfaac | 4321 | usGfsuGfaGfuUfgUfgGfcAfc |
| | | ucacasusu | | AfcCfasusu |
| ETD02234 | 4503 | [ETL17]sugugccAfcAfAfcucac | 4212 | usGfsuUfgUfgAfgUfuGfuGfg |
| | | aacasusu | | CfaCfasusu |
| ETD02235 | 4504 | [ETL17]sacaaCfUfcaCfaacuacg | 4215 | usGfsuCfgUfaGfuUfgUfgAfg |
| | | acasusu | | UfuGfususu |
| ETD02236 | 4505 | [ETL17]saacucAfcAfAfcuacga | 4322 | usCfsgGfuCfgUfaGfuUfgUfg |
| | | ccgasusu | | AfgUfususu |
| ETD02237 | 4506 | [ETL17]sucacAfAfcuAfcGfacc | 4323 | usUfscCfcGfgUfcGfuAfgUfu |
| | | gggaasusu | | GfuGfasusu |
| ETD02238 | 4507 | [ETL17]sagaaGfAfGfGfAfcgu | 4324 | usGfscAfgGfaAfcGfuCfcUfc |
| | | uccugcasusu | | UfuCfususu |
| ETD02239 | 4508 | [ETL17]sagcaCfUfUfCfUfucaa | 4325 | usUfsgCfgGfuUfgAfaGfaAfg |
| | | ccgcaasusu | | UfgCfususu |
| ETD02240 | 4509 | [ETL17]scacuUfCfUfUfCfaacc | 4326 | usCfsgUfgCfgGfuUfgAfaGfa |
| | | gcacgasusu | | AfgUfgsusu |
| ETD02241 | 4510 | [ETL17]sacuuCfuUfCfdAAfcc | 4220 | usUfscGfuGfcGfgUfuGfaAfg |
| | | gcacgaasusu | | AfaGfususu |
| ETD02242 | 4511 | [ETL17]scuucUfuCfAfdAccgc | 4327 | usGfsuCfgUfgCfgGfuUfgAfa |
| | | acgacasusu | | GfaAfgsusu |
| ETD02243 | 4512 | [ETL17]suucuUfCfaaCfCfgcac | 4328 | usCfsgUfcGfuGfcGfgUfuGfa |
| | | gacgasusu | | AfgAfasusu |
| ETD02244 | 4513 | [ETL17]sucuuCfaaCfCfgCfacg | 4329 | usCfscGfuCfgUfgCfgGfuUfg |
| | | acggasusu | | AfaGfasusu |
| ETD02245 | 4514 | [ETL17]suucggCfaUfCfgagaag | 4222 | usGfsuAfcUfuCfuCfgAfuGfc |
| | | uacasusu | | CfgAfasusu |
| ETD02246 | 4515 | [ETL17]saucgAfGfAfAfGfuac | 4224 | usCfsgGfgAfuGfuAfcUfuCfu |
| | | aucccgasusu | | CfgAfususu |
| ETD02247 | 4516 | [ETL17]sucgaGfaAfGfdTaCfa | 4225 | usAfscGfgGfaUfgUfaCfuUfc |
| | | ucccguasusu | | UfcGfasusu |
| ETD02248 | 4517 | [ETL17]sgaagUfaCfaUfCfccgu | 4227 | usGfsuGfuAfcGfgGfaUfgUfa |
| | | acacasusu | | CfuUfcsusu |
| ETD02249 | 4518 | [ETL17]sucuguGfccGfGfcuacu | 4330 | usCfsgAfaGfuAfgCfcGfgCfa |
| | | ucgasusu | | CfaGfasusu |
| ETD02250 | 4519 | [ETL17]scuacUfuCfGfdAcugc | 4231 | usGfsaCfuUfgCfaGfuCfgAfa |
| | | aagucasusu | | GfuAfgsusu |
| ETD02251 | 4520 | [ETL17]sacuuCfgaCfUfgCfaag | 4232 | usCfsgGfaCfuUfgCfaGfuCfg |
| | | uccgasusu | | AfaGfususu |
| ETD02252 | 4521 | [ETL17]suucgaCfUfgCfaagucc | 4331 | usGfsuCfgGfaCfuUfgCfaGfu |
| | | gacasusu | | CfgAfasusu |
| ETD02253 | 4522 | [ETL17]suuacCfuCfUfdAcGfg | 4233 | usAfsuGfaUfgCfcGfuAfgAfg |
| | | caucauasusu | | GfuAfasusu |

TABLE 5
Example siRNA BASE Sequences

| | SEQ | Sense Strand | SEQ | Antisense Strand |
|---|---|---|---|---|
| siRNA | ID | Base Sequence | ID | Base Sequence |
| Name | NO: | (5′ to 3′) | NO: | (5′ to 3′) |
| ETD02231 | 4562 | AACCUAAUGCCACAGCGAAUU | 4617 | UUCGCUGUGGCAUUAGGUUUU |
| ETD02232 | 4563 | ACUAUCCUGGUGACCUCUAUU | 4618 | UAGAGGUCACCAGGAUAGUUU |
| ETD02233 | 4564 | UGGUGUGCCACAACUCACAUU | 4619 | UGUGAGUUGUGGCACACCAUU |
| ETD02234 | 4565 | UGUGCCACAACUCACAACAUU | 4620 | UGUUGUGAGUUGUGGCACAUU |
| ETD02235 | 4566 | ACAACUCACAACUACGACAUU | 4621 | UGUCGUAGUUGUGAGUUGUUU |
| ETD02236 | 4567 | AACUCACAACUACGACCGAUU | 4622 | UCGGUCGUAGUUGUGAGUUUU |
| ETD02237 | 4568 | UCACAACUACGACCGGGAAUU | 4623 | UUCCCGGUCGUAGUUGUGAUU |
| ETD02238 | 4569 | AGAAGAGGACGUUCCUGCAUU | 4624 | UGCAGGAACGUCCUCUUCUUU |
| ETD02239 | 4570 | AGCACUUCUUCAACCGCAAUU | 4625 | UUGCGGUUGAAGAAGUGCUUU |
| ETD02240 | 4571 | CACUUCUUCAACCGCACGAUU | 4626 | UCGUGCGGUUGAAGAAGUGUU |
| ETD02241 | 4572 | ACUUCUUCAACCGCACGAAUU | 4627 | UUCGUGCGGUUGAAGAAGUUU |
| ETD02242 | 4573 | CUUCUUCAACCGCACGACAUU | 4628 | UGUCGUGCGGUUGAAGAAGUU |
| ETD02243 | 4574 | UUCUUCAACCGCACGACGAUU | 4629 | UCGUCGUGCGGUUGAAGAAUU |
| ETD02244 | 4575 | UCUUCAACCGCACGACGGAUU | 4630 | UCCGUCGUGCGGUUGAAGAUU |
| ETD02245 | 4576 | UUCGGCAUCGAGAAGUACAUU | 4631 | UGUACUUCUCGAUGCCGAAUU |
| ETD02246 | 4577 | AUCGAGAAGUACAUCCCGAUU | 4632 | UCGGGAUGUACUUCUCGAUUU |
| ETD02247 | 4578 | UCGAGAAGTACAUCCCGUAUU | 4633 | UACGGGAUGUACUUCUCGAUU |
| ETD02248 | 4579 | GAAGUACAUCCCGUACACAUU | 4634 | UGUGUACGGGAUGUACUUCUU |
| ETD02249 | 4580 | UCUGUGCCGGCUACUUCGAUU | 4635 | UCGAAGUAGCCGGCACAGAUU |
| ETD02250 | 4581 | CUACUUCGACUGCAAGUCAUU | 4636 | UGACUUGCAGUCGAAGUAGUU |
| ETD02251 | 4582 | ACUUCGACUGCAAGUCCGAUU | 4637 | UCGGACUUGCAGUCGAAGUUU |
| ETD02252 | 4583 | UUCGACUGCAAGUCCGACAUU | 4638 | UGUCGGACUUGCAGUCGAAUU |
| ETD02253 | 4584 | UUACCUCUACGGCAUCAUAUU | 4639 | UAUGAUGCCGUAGAGGUAAUU |
| | | Sense Strand | | Antisense Strand |
| | SEQ | Base Sequence | SEQ | Base Sequence |
| siRNA | ID | (5′ to 3′), | ID | (5′ to 3′), |
| Name | NO: | without 3′ overhangs | NO: | without 3′ overhangs |
| ETD02231 | 4757 | AACCUAAUGCCACAGCGAA | 4780 | UUCGCUGUGGCAUUAGGUU |
| ETD02232 | 4758 | ACUAUCCUGGUGACCUCUA | 4781 | UAGAGGUCACCAGGAUAGU |
| ETD02233 | 4759 | UGGUGUGCCACAACUCACA | 4782 | UGUGAGUUGUGGCACACCA |
| ETD02234 | 4760 | UGUGCCACAACUCACAACA | 4783 | UGUUGUGAGUUGUGGCACA |
| ETD02235 | 4761 | ACAACUCACAACUACGACA | 4784 | UGUCGUAGUUGUGAGUUGU |
| ETD02236 | 4762 | AACUCACAACUACGACCGA | 4785 | UCGGUCGUAGUUGUGAGUU |
| ETD02237 | 4763 | UCACAACUACGACCGGGAA | 4786 | UUCCCGGUCGUAGUUGUGA |
| ETD02238 | 4764 | AGAAGAGGACGUUCCUGCA | 4787 | UGCAGGAACGUCCUCUUCU |
| ETD02239 | 4765 | AGCACUUCUUCAACCGCAA | 4788 | UUGCGGUUGAAGAAGUGCU |
| ETD02240 | 4766 | CACUUCUUCAACCGCACGA | 4789 | UCGUGCGGUUGAAGAAGUG |
| ETD02241 | 4767 | ACUUCUUCAACCGCACGAA | 4790 | UUCGUGCGGUUGAAGAAGU |
| ETD02242 | 4768 | CUUCUUCAACCGCACGACA | 4791 | UGUCGUGCGGUUGAAGAAG |
| ETD02243 | 4769 | UUCUUCAACCGCACGACGA | 4792 | UCGUCGUGCGGUUGAAGAA |
| ETD02244 | 4770 | UCUUCAACCGCACGACGGA | 4793 | UCCGUCGUGCGGUUGAAGA |
| ETD02245 | 4771 | UUCGGCAUCGAGAAGUACA | 4794 | UGUACUUCUCGAUGCCGAA |
| ETD02246 | 4772 | AUCGAGAAGUACAUCCCGA | 4795 | UCGGGAUGUACUUCUCGAU |
| ETD02247 | 4773 | UCGAGAAGTACAUCCCGUA | 4796 | UACGGGAUGUACUUCUCGA |
| ETD02248 | 4774 | GAAGUACAUCCCGUACACA | 4797 | UGUGUACGGGAUGUACUUC |
| ETD02249 | 4775 | UCUGUGCCGGCUACUUCGA | 4798 | UCGAAGUAGCCGGCACAGA |
| ETD02250 | 4776 | CUACUUCGACUGCAAGUCA | 4799 | UGACUUGCAGUCGAAGUAG |
| ETD02251 | 4777 | ACUUCGACUGCAAGUCCGA | 4800 | UCGGACUUGCAGUCGAAGU |
| ETD02252 | 4778 | UUCGACUGCAAGUCCGACA | 4801 | UGUCGGACUUGCAGUCGAA |
| ETD02253 | 4779 | UUACCUCUACGGCAUCAUA | 4802 | UAUGAUGCCGUAGAGGUAA |

TABLE 6
Relative Mean Serum Human HGFAC Levels
in AAV8-TBG-h-HGFAC Mice, Study Part 1

| | | | | Mean Serum Human HGFAC | | |
|---|---|---|---|---|---|---|
| | | | Dose | (Relative to Day 0) | | |
| Group | n | Treatment | (ug) | Day 0 | Day 5 | Day 11 |
| 1 | 4 | PBS | | 1.00 | 0.46 | 1.38 |
| 2 | 3 | ETD02231 | 100 | 1.00 | 0.47 | 0.71 |
| 3 | 4 | ETD02232 | 100 | 1.00 | 0.37 | 1.17 |
| 4 | 4 | ETD02233 | 100 | 1.00 | 0.18 | 0.31 |
| 5 | 3 | ETD02234 | 100 | 1.00 | 0.22 | 0.89 |
| 6 | 4 | ETD02235 | 100 | 1.00 | 0.47 | 0.97 |
| 7 | 4 | ETD02236 | 100 | 1.00 | 0.38 | 0.65 |
| 8 | 4 | ETD02237 | 100 | 1.00 | 0.66 | 1.03 |
| 9 | 4 | ETD02238 | 100 | 1.00 | 0.70 | 0.32 |
| 10 | 3 | ETD02239 | 100 | 1.00 | 0.19 | 0.11 |
| 11 | 4 | ETD02240 | 100 | 1.00 | 1.18 | 0.83 |
| 12 | 3 | ETD02241 | 100 | 1.00 | 0.56 | 0.54 |

TABLE 7
Relative Mean Serum Human HGFAC Levels
in AAV8-TBG-h-HGFAC Mice, Study Part 2

| | | | | Mean Serum Human HGFAC | | |
|---|---|---|---|---|---|---|
| | | | Dose | (Relative to Day 0) | | |
| Group | n | Treatment | (ug) | Day 0 | Day 5 | Day 11 |
| 1 | 3 | PBS | | 1.00 | 0.54 | 0.86 |
| 2 | 4 | ETD02242 | 100 | 1.00 | 0.72 | 0.37 |
| 3 | 4 | ETD02243 | 100 | 1.00 | 1.35 | 1.04 |
| 4 | 4 | ETD02244 | 100 | 1.00 | 0.74 | 0.98 |
| 5 | 2 | ETD02245 | 100 | 1.00 | 0.57 | 0.78 |
| 6 | 4 | ETD02246 | 100 | 1.00 | 0.32 | 0.33 |
| 7 | 3 | ETD02247 | 100 | 1.00 | 0.76 | 0.18 |
| 8 | 3 | ETD02248 | 100 | 1.00 | 0.33 | 1.11 |
| 9 | 3 | ETD02249 | 100 | 1.00 | 0.37 | 0.59 |
| 10 | 1 | ETD02250 | 100 | 1.00 | 0.61 | 0.23 |
| 11 | 3 | ETD02251 | 100 | 1.00 | 0.76 | 0.34 |
| 12 | 4 | ETD02252 | 100 | 1.00 | 1.24 | 0.72 |
| 13 | 3 | ETD02253 | 100 | 1.00 | 0.17 | 0.19 |

TABLE 8
Relative Human HGFAC mRNA Levels in Livers
of AAV8-TBG-h-HGFAC Mice, Study Part 1

| | | | Dose | Mean Human HGFAC mRNA |
|---|---|---|---|---|
| Group | n | Treatment | (ug) | (Relative to Group 1, Day 11) |
| 1 | 4 | PBS | | 1.00 |
| 2 | 4 | ETD02231 | 100 | 0.19 |
| 3 | 4 | ETD02232 | 100 | 0.51 |
| 4 | 4 | ETD02233 | 100 | 0.26 |
| 5 | 4 | ETD02234 | 100 | 1.60 |
| 6 | 4 | ETD02235 | 100 | 0.85 |
| 7 | 3 | ETD02236 | 100 | 0.36 |
| 8 | 3 | ETD02237 | 100 | 0.92 |
| 9 | 4 | ETD02238 | 100 | 0.58 |
| 10 | 4 | ETD02239 | 100 | 0.32 |
| 11 | 3 | ETD02240 | 100 | 0.37 |
| 12 | 4 | ETD02241 | 100 | 0.36 |

TABLE 9
Relative Human HGFAC mRNA Levels in Livers
of AAV8-TBG-h-HGFAC Mice, Study Part 2

| | | | Dose | Mean Human HGFAC mRNA |
|---|---|---|---|---|
| Group | n | Treatment | (ug) | (Relative to Group 1, Day 11) |
| 1 | 4 | PBS | | 1.00 |
| 2 | 4 | ETD02242 | 100 | 0.90 |
| 3 | 4 | ETD02243 | 100 | 0.84 |
| 4 | 4 | ETD02244 | 100 | 0.99 |
| 5 | 3 | ETD02245 | 100 | 2.19 |
| 6 | 4 | ETD02246 | 100 | 0.70 |
| 7 | 3 | ETD02247 | 100 | 0.29 |
| 8 | 4 | ETD02248 | 100 | 0.74 |
| 9 | 3 | ETD02249 | 100 | 0.30 |
| 10 | 3 | ETD02250 | 100 | 0.09 |
| 11 | 3 | ETD02251 | 100 | 0.36 |
| 12 | 4 | ETD02252 | 100 | 0.28 |
| 13 | 4 | ETD02253 | 100 | 0.13 |

### Example 7. Testing the Activity of HGFAC siRNAs ETD02081-ETD02103 in Mice Transfected with AAV8-TBG-h-HGFAC

[0314] The activities of siRNAs, namely ETD02081-ETD02103, were assessed. These siRNAs have the identical sequence and modification pattern as ETD02131-ETD02253, but with a 2′OMe at position 2 of the AS strand. The siRNAs were attached to the GalNAc ligand ETL17 followed by a phosphorothioate linkage at the 5′ end of the sense strand. The siRNAs used in this Example are included in Table 10, where Nf is a 2′ fluoro-modified nucleoside, n is a 2′ O-methyl modified nucleoside, “d” is a 2′ deoxynucleoside, and “s” is a phosphorothioate linkage. The base sequences are the same as those in Table 5. ETD02081-ETD02092 were tested in part 1 of the study and ETD02092-ETD02103 were tested in part 2.

[0315] Six to eight week old female mice (C57Bl/6) were injected with 5 μL of a recombinant adeno-associated virus 8 (AAV8) vector (2.0×10E13 genome copies/mL) by the retroorbital or tail vein route. The recombinant AAV8 contained the open reading frame and the majority of the 3′UTR of the human HGFAC sequence (GenBank Accession #BC 112190) under the control of the human thyroxine binding globulin promoter in an AAV2 backbone packaged in AAV8 capsid (AAV8-TBG-h-HGFAC).

[0316] On Day 17 (study part 1) or on Day 16 (study part 2) after infection mice were given a subcutaneous injection of a single 100 μg dose of a GalNAc-conjugated siRNA or PBS as vehicle control. On Day 11 after subcutaneous injection, mice were euthanized and a liver sample from each was collected and placed in RNAlater (ThermoFisher Cat #AM7020) until processing. Total liver RNA was prepared by homogenizing the liver tissue in homogenization buffer (Maxwell RSC simplyRNA Tissue Kit) using a Percellys 24 tissue homogenizer (Bertin Instruments) set at 5000 rpm for two 10 second cycles. Total RNA from the lysate was purified on a Maxwell RSC 48 platform (Promega Corporation) according to the manufacturer's recommendations. Preparation of cDNA was performed using Quanta qScript cDNA SuperMix (VWR, Catalog #95048-500) according to the manufacturer's instructions. The relative levels of liver HGFAC mRNA were assessed by RT-qPCR in triplicate on a QuantStudio™ 6 Pro Real-Time PCR System using TaqMan assays for human HGFAC (ThermoFisher, assay #Hs00173526_ml) and the mouse housekeeping gene PPIA (ThermoFisher, assay #Mm02342430_g1) and PerfeCTa® qPCR FastMix®, Low ROX™ (VWR, Catalog #101419-222). Mice with undetectable hHGFAC expression were omitted from further analysis. Data were normalized to the level in animals receiving PBS. The results of part 1 of the study are shown in Table 11, and the results from part 2 are shown in Table 12.

TABLE 10
Example siRNA Sequences

| | SEQ | Sense Strand | SEQ | Antisense Strand |
|---|---|---|---|---|
| siRNA | ID | Sequence (5′-3′) | ID | Sequence |
| Name | NO: | with GalNAc moiety | NO: | (5′-3′) |
| ETD02081 | 4523 | [ETL17]saaccuAfAfuGfccacag | 4332 | uucGfcUfgUfgGfcAfuUfaGfg |
| | | cgaasusu | | Ufususu |
| ETD02082 | 4524 | [ETL17]sacuaUfcCfUfdGGfug | 4333 | uagAfgGfuCfaCfcAfgGfaUfa |
| | | accucuasusu | | Gfususu |
| ETD02083 | 4525 | [ETL17]suggugUfgCfCfaCfaac | 4334 | uguGfaGfuUfgUfgGfcAfcAfc |
| | | ucacasusu | | Cfasusu |
| ETD02084 | 4526 | [ETL17]sugugccAfcAfAfcucac | 4335 | uguUfgUfgAfgUfuGfuGfgCfa |
| | | aacasusu | | Cfasusu |
| ETD02085 | 4527 | [ETL17]sacaaCfUfcaCfaacuacg | 4336 | uguCfgUfaGfuUfgUfgAfgUfu |
| | | acasusu | | Gfususu |
| ETD02086 | 4528 | [ETL17]saacucAfcAfAfcuacga | 4337 | ucgGfuCfgUfaGfuUfgUfgAfg |
| | | ccgasusu | | Ufususu |
| ETD02087 | 4529 | [ETL17]sucacAfAfcuAfcGfacc | 4338 | uucCfcGfgUfcGfuAfgUfuGfu |
| | | gggaasusu | | Gfasusu |
| ETD02088 | 4530 | [ETL17]sagaaGfAfGfGfAfcgu | 4339 | ugcAfgGfaAfcGfuCfcUfcUfu |
| | | uccugcasusu | | Cfususu |
| ETD02089 | 4531 | [ETL17]sagcaCfUfUfCfUfucaa | 4340 | uugCfgGfuUfgAfaGfaAfgUfg |
| | | ccgcaasusu | | Cfususu |
| ETD02090 | 4532 | [ETL17]scacuUfCfUfUfCfaacc | 4341 | ucgUfgCfgGfuUfgAfaGfaAfg |
| | | gcacgasusu | | Ufgsusu |
| ETD02091 | 4533 | [ETL17]sacuuCfuUfCfdAAfcc | 4342 | uucGfuGfcGfgUfuGfaAfgAfa |
| | | gcacgaasusu | | Gfususu |
| ETD02092 | 4534 | [ETL17]scuucUfuCfAfdAccgc | 4343 | uguCfgUfgCfgGfuUfgAfaGfa |
| | | acgacasusu | | Afgsusu |
| ETD02093 | 4535 | [ETL17]suucuUfCfaaCfCfgcac | 4344 | ucgUfcGfuGfcGfgUfuGfaAfg |
| | | gacgasusu | | Afasusu |
| ETD02094 | 4536 | [ETL17]sucuuCfaaCfCfgCfacg | 4345 | uccGfuCfgUfgCfgGfuUfgAfa |
| | | acggasusu | | Gfasusu |
| ETD02095 | 4537 | [ETL17]suucggCfaUfCfgagaag | 4346 | uguAfcUfuCfuCfgAfuGfcCfg |
| | | uacasusu | | Afasusu |
| ETD02096 | 4538 | [ETL17]saucgAfGfAfAfGfuac | 4347 | ucgGfgAfuGfuAfcUfuCfuCfg |
| | | aucccgasusu | | Afususu |
| ETD02097 | 4539 | [ETL17]sucgaGfaAfGfdTaCfa | 4348 | uacGfgGfaUfgUfaCfuUfcUfc |
| | | ucccguasusu | | Gfasusu |
| ETD02098 | 4540 | [ETL17]sgaagUfaCfaUfCfccgu | 4349 | uguGfuAfcGfgGfaUfgUfaCfu |
| | | acacasusu | | Ufcsusu |
| ETD02099 | 4541 | [ETL17]sucuguGfccGfGfcuacu | 4350 | ucgAfaGfuAfgCfcGfgCfaCfa |
| | | ucgasusu | | Gfasusu |
| ETD02100 | 4542 | [ETL17]scuacUfuCfGfdAcugc | 4351 | ugaCfuUfgCfaGfuCfgAfaGfu |
| | | aagucasusu | | Afgsusu |
| ETD02101 | 4543 | [ETL17]sacuuCfgaCfUfgCfaag | 4352 | ucgGfaCfuUfgCfaGfuCfgAfa |
| | | uccgasusu | | Gfususu |
| ETD02102 | 4544 | [ETL17]suucgaCfUfgCfaagucc | 4353 | uguCfgGfaCfuUfgCfaGfuCfg |
| | | gacasusu | | Afasusu |
| ETD02103 | 4545 | [ETL17]suuacCfuCfUfdAcGfg | 4354 | uauGfaUfgCfcGfuAfgAfgGfu |
| | | caucauasusu | | Afasusu |

TABLE 11
Relative Human HGFAC mRNA Levels in Livers
of AAV8-TBG-h-HGFAC Mice, Study Part 1

| | | | Dose | Mean Human HGFAC mRNA |
|---|---|---|---|---|
| Group | n | Treatment | (ug) | (Relative to Group 1, Day 10) |
| 1 | 4 | PBS | | 1.00 |
| 2 | 4 | ETD02081 | 100 | 1.18 |
| 3 | 4 | ETD02082 | 100 | 0.95 |
| 4 | 4 | ETD02083 | 100 | 0.80 |
| 5 | 4 | ETD02084 | 100 | 1.09 |
| 6 | 4 | ETD02085 | 100 | 0.43 |
| 7 | 4 | ETD02086 | 100 | 0.61 |
| 8 | 4 | ETD02087 | 100 | 0.37 |
| 9 | 4 | ETD02088 | 100 | 0.12 |
| 10 | 4 | ETD02089 | 100 | 0.30 |
| 11 | 4 | ETD02090 | 100 | 0.33 |
| 12 | 4 | ETD02091 | 100 | 0.48 |

TABLE 12
Relative Human HGFAC mRNA Levels in Livers
of AAV8-TBG-h-HGFAC Mice, Study Part 2

| | | | Dose | Mean Human HGFAC mRNA |
|---|---|---|---|---|
| Group | n | Treatment | (ug) | (Relative to Group 1, Day 10) |
| 1 | 3 | PBS | | 1.00 |
| 2 | 4 | ETD02092 | 100 | 1.48 |
| 3 | 4 | ETD02093 | 100 | 1.21 |
| 4 | 4 | ETD02094 | 100 | 0.95 |
| 5 | 4 | ETD02095 | 100 | 2.41 |
| 6 | 4 | ETD02096 | 100 | 2.13 |
| 7 | 4 | ETD02097 | 100 | 1.35 |
| 8 | 4 | ETD02098 | 100 | 1.12 |
| 9 | 4 | ETD02099 | 100 | 0.91 |
| 10 | 4 | ETD02100 | 100 | 0.16 |
| 11 | 4 | ETD02101 | 100 | 0.42 |
| 12 | 4 | ETD02102 | 100 | 0.26 |
| 13 | 4 | ETD02103 | 100 | 0.23 |

### Example 8. Testing the Activity of HGFAC siRNAs ETD02381-ETD02396 in Wild Type Mice

[0317] The activities of siRNAs, namely ETD022381-ETD02396, were assessed. The siRNAs were attached to the GalNAc ligand ETL17 followed by a phosphorothioate linkage at the 5′ end of the sense strand. The siRNAs used in this Example are included in Table 13, where Nf is a 2′ fluoro-modified nucleoside, n is a 2′ O-methyl modified nucleoside, “d” is a 2′ deoxynucleoside, and “s” is a phosphorothioate linkage. The base sequences for each siRNA, with and without the 3′ UU extension, are shown in Table 14.

[0318] On Day 0 female mice (strain ICR) were given a subcutaneous injection of a single 200 μg dose of a GalNAc-conjugated siRNA or PBS as vehicle control. A mouse-specific siRNA ETD02258 was used as a positive control (Sense strand, [ETL 17]saugcUfuUfGfAfugaaacacgasusu [SEQ ID NO: 4822]; antisense strand, usCfsgUfgUfuUfcAfuCfaAfaGfcAfususu [SEQ ID NO: 4823]). On Day 11 after subcutaneous injection, mice were euthanized and a liver sample from each was collected and placed in RNAlater (ThermoFisher Cat #AM7020) until processing. Total liver RNA was prepared by homogenizing the liver tissue in homogenization buffer (Maxwell RSC simplyRNA Tissue Kit) using a Percellys 24 tissue homogenizer (Bertin Instruments) set at 5000 rpm for two 10 second cycles. Total RNA from the lysate was purified on a Maxwell RSC 48 platform (Promega Corporation) according to the manufacturer's recommendations. Preparation of cDNA was performed using Quanta qScript cDNA SuperMix (VWR, Catalog #95048-500) according to the manufacturer's instructions. The relative levels of liver HGFAC mRNA were assessed by RT-qPCR in triplicate on a QuantStudio™ 6 Pro Real-Time PCR System using TaqMan assays for mouse HGFAC (ThermoFisher, assay #Mm00469483 ml) and the mouse housekeeping gene PPIA (ThermoFisher, assay #Mm02342430_g1) and PerfeCTa® qPCR FastMix®, Low ROX™ (VWR, Catalog #101419-222). Data were normalized to the level in animals receiving PBS. The results of part 1 of the study are shown in Table 15.

TABLE 13
Example siRNA Sequences

| siRNA | SEQ ID | Sense Strand Sequence (5′-3′) | SEQ ID | Antisense Strand Sequence |
|---|---|---|---|---|
| Name | NO: | with GalNAc moiety | NO: | (5′-3′) |
| ETD02381 | 4546 | [ETL17]scggcAfcAfGfAfGfaaa | 4483 | usAfsaGfcAfuUfuCfuCfuGfu |
| | | ugcuuasusu | | GfcCfgsusu |
| ETD02382 | 4547 | [ETL17]sggcacAfGfAfGfAfaa | 4484 | usAfsaAfgCfaUfuUfcUfcUfg |
| | | | | UfgCfcsusu |
| ETD02383 | 4548 | [ETL17]sgcacAfGfAfGfAfaau | 4485 | usCfsaAfaGfcAfuUfuCfuCfu |
| | | gcuuugasusu | | GfuGfcsusu |
| ETD02384 | 4549 | [ETL17]scacaGfAfGfAfAfaugc | 4486 | usUfscAfaAfgCfaUfuUfcUfc |
| | | uuugaasusu | | UfgUfgsusu |
| ETD02385 | 4550 | [ETL17]sacagAfGfAfAfAfugc | 4487 | usAfsuCfaAfaGfcAfuUfuCfu |
| | | uuugauasusu | | CfuGfususu |
| ETD02386 | 4551 | [ETL17]scagaGfaAfAfdTgCfu | 4488 | usCfsaUfcAfaAfgCfaUfuUfc |
| | | uugaugasusu | | UfcUfgsusu |
| ETD02387 | 4552 | [ETL17]sagagAfAfauGfcuuuga | 4489 | usUfscAfuCfaAfaGfcAfuUfu |
| | | ugaasusu | | CfuCfususu |
| ETD02388 | 4553 | [ETL17]sgaaaUfgCfUfUfUfga | 4490 | usGfsuCfuCfaUfcAfaAfgCfa |
| | | ugagacasusu | | UfuUfcsusu |
| ETD02389 | 4554 | [ETL17]sacauaCfagCfUfugucu | 4491 | usCfsuCfaGfaCfaAfgCfuGfu |
| | | gagasusu | | AfuGfususu |
| ETD02390 | 4555 | [ETL17]sugauCfCfggCfUfgaag | 4492 | usUfscUfuCfuUfcAfgCfcGfg |
| | | aagaasusu | | AfuCfasusu |
| ETD02391 | 4556 | [ETL17]sgaucCfggCfUfgaagaa | 4493 | usUfsuCfuUfcUfuCfaGfcCfg |
| | | gaaasusu | | GfaUfcsusu |
| ETD02392 | 4557 | [ETL17]saggacAfcAfAfgugcca | 4494 | usAfsuCfuGfgCfaCfuUfgUfg |
| | | gauasusu | | UfcCfususu |
| ETD02393 | 4558 | [ETL17]sccaacuAfuGfuGfgacu | 4495 | usUfscCfaGfuCfcAfcAfuAfg |
| | | ggaasusu | | UfuGfgsusu |
| ETD02394 | 4559 | [ETL17]scaacUfaUfgUfggacug | 4496 | usAfsuCfcAfgUfcCfaCfaUfa |
| | | gauasusu | | GfuUfgsusu |
| ETD02395 | 4560 | [ETL17]scuauGfuGfgAfcuggau | 4497 | usUfsuGfaUfcCfaGfuCfcAfc |
| | | caaasusu | | AfuAfgsusu |
| ETD02396 | 4561 | [ETL17]suaugUfggaCfUfggauc | 4498 | usGfsuUfgAfuCfcAfgUfcCfa |
| | | aacasusu | | CfaUfasusu |

TABLE 14
Example siRNA BASE Sequences

| | SEQ | Sense Strand | SEQ | Antisense Strand |
|---|---|---|---|---|
| siRNA | ID | Base Sequence | ID | Base Sequence |
| Name | NO: | (5′ to 3′) | NO: | (5′ to 3′) |
| ETD02381 | 4585 | CGGCACAGAGAAAUGCUUAUU | 4640 | UAAGCAUUUCUCUGUGCCGUU |
| ETD02382 | 4586 | GGCACAGAGAAAUGCUUUAUU | 4641 | UAAAGCAUUUCUCUGUGCCUU |
| ETD02383 | 4587 | GCACAGAGAAAUGCUUUGAUU | 4642 | UCAAAGCAUUUCUCUGUGCUU |
| ETD02384 | 4588 | CACAGAGAAAUGCUUUGAAUU | 4643 | UUCAAAGCAUUUCUCUGUGUU |
| ETD02385 | 4589 | ACAGAGAAAUGCUUUGAUAUU | 4644 | UAUCAAAGCAUUUCUCUGUUU |
| ETD02386 | 4590 | CAGAGAAATGCUUUGAUGAUU | 4645 | UCAUCAAAGCAUUUCUCUGUU |
| ETD02387 | 4591 | AGAGAAAUGCUUUGAUGAAUU | 4646 | UUCAUCAAAGCAUUUCUCUUU |
| ETD02388 | 4592 | GAAAUGCUUUGAUGAGACAUU | 4647 | UGUCUCAUCAAAGCAUUUCUU |
| ETD02389 | 4593 | ACAUACAGCUUGUCUGAGAUU | 4648 | UCUCAGACAAGCUGUAUGUUU |
| ETD02390 | 4594 | UGAUCCGGCUGAAGAAGAAUU | 4649 | UUCUUCUUCAGCCGGAUCAUU |
| ETD02391 | 4595 | GAUCCGGCUGAAGAAGAAAUU | 4650 | UUUCUUCUUCAGCCGGAUCUU |
| ETD02392 | 4596 | AGGACACAAGUGCCAGAUAUU | 4651 | UAUCUGGCACUUGUGUCCUUU |
| ETD02393 | 4597 | CCAACUAUGUGGACUGGAAUU | 4652 | UUCCAGUCCACAUAGUUGGUU |
| ETD02394 | 4598 | CAACUAUGUGGACUGGAUAUU | 4653 | UAUCCAGUCCACAUAGUUGUU |
| ETD02395 | 4599 | CUAUGUGGACUGGAUCAAAUU | 4654 | UUUGAUCCAGUCCACAUAGUU |
| ETD02396 | 4600 | UAUGUGGACUGGAUCAACAUU | 4655 | UGUUGAUCCAGUCCACAUAUU |
| | | Sense Strand | | Antisense Strand |
| | SEQ | Base Sequence | SEQ | Base Sequence |
| siRNA | ID | (5′ to 3′), | ID | (5′ to 3′), |
| Name | NO: | without 3′ overhangs | NO: | without 3′ overhangs |
| ETD02381 | 4601 | CGGCACAGAGAAAUGCUUA | 4656 | UAAGCAUUUCUCUGUGCCG |
| ETD02382 | 4602 | GGCACAGAGAAAUGCUUUA | 4657 | UAAAGCAUUUCUCUGUGCC |
| ETD02383 | 4603 | GCACAGAGAAAUGCUUUGA | 4658 | UCAAAGCAUUUCUCUGUGC |
| ETD02384 | 4604 | CACAGAGAAAUGCUUUGAA | 4659 | UUCAAAGCAUUUCUCUGUG |
| ETD02385 | 4605 | ACAGAGAAAUGCUUUGAUA | 4660 | UAUCAAAGCAUUUCUCUGU |
| ETD02386 | 4606 | CAGAGAAATGCUUUGAUGA | 4661 | UCAUCAAAGCAUUUCUCUG |
| ETD02387 | 4607 | AGAGAAAUGCUUUGAUGAA | 4662 | UUCAUCAAAGCAUUUCUCU |
| ETD02388 | 4608 | GAAAUGCUUUGAUGAGACA | 4663 | UGUCUCAUCAAAGCAUUUC |
| ETD02389 | 4609 | ACAUACAGCUUGUCUGAGA | 4664 | UCUCAGACAAGCUGUAUGU |
| ETD02390 | 4610 | UGAUCCGGCUGAAGAAGAA | 4665 | UUCUUCUUCAGCCGGAUCA |
| ETD02391 | 4611 | GAUCCGGCUGAAGAAGAAA | 4666 | UUUCUUCUUCAGCCGGAUC |
| ETD02392 | 4612 | AGGACACAAGUGCCAGAUA | 4667 | UAUCUGGCACUUGUGUCCU |
| ETD02393 | 4613 | CCAACUAUGUGGACUGGAA | 4668 | UUCCAGUCCACAUAGUUGG |
| ETD02394 | 4614 | CAACUAUGUGGACUGGAUA | 4669 | UAUCCAGUCCACAUAGUUG |
| ETD02395 | 4615 | CUAUGUGGACUGGAUCAAA | 4670 | UUUGAUCCAGUCCACAUAG |
| ETD02396 | 4616 | UAUGUGGACUGGAUCAACA | 4671 | UGUUGAUCCAGUCCACAUA |

TABLE 15
Relative Mouse HGFAC mRNA Levels in Livers of ICR Mice

| | | | Dose | Mean Mouse HGFAC mRNA |
|---|---|---|---|---|
| Group | n | Treatment | (ug) | (Relative to Group 1, Day 11) |
| 1 | 4 | PBS | | 1.00 |
| 2 | 4 | ETD02258 | 200 | 0.06 |
| 3 | 4 | ETD02381 | 200 | 0.18 |
| 4 | 4 | ETD02382 | 200 | 0.17 |
| 5 | 4 | ETD02383 | 200 | 0.11 |
| 6 | 4 | ETD02384 | 200 | 0.15 |
| 7 | 4 | ETD02385 | 200 | 0.12 |
| 8 | 4 | ETD02386 | 200 | 0.13 |
| 9 | 4 | ETD02387 | 200 | 0.18 |
| 10 | 4 | ETD02388 | 200 | 0.31 |
| 11 | 4 | ETD02389 | 200 | 1.40 |
| 12 | 4 | ETD02390 | 200 | 0.81 |
| 13 | 4 | ETD02391 | 200 | 0.46 |
| 14 | 4 | ETD02392 | 200 | 0.41 |
| 15 | 4 | ETD02393 | 200 | 0.21 |
| 16 | 4 | ETD02394 | 200 | 0.32 |
| 17 | 4 | ETD02395 | 200 | 0.08 |
| 18 | 4 | ETD02396 | 200 | 0.41 |

### Example 9: Oligonucleotide Synthesis

[0319] Oligonucleotides such as siRNAs may be synthesized according to phosphoramidite technology on a solid phase. For example, a K&A oligonucleotide synthesizer may be used. Syntheses may be performed on a solid support made of controlled pore glass (CPG, 500 Å or 600 Å, obtained from AM Chemicals, Oceanside, CA, USA). All 2′-OMe and 2′-F phosphoramidites may be purchased from Hongene Biotech (Union City, CA, USA). All phosphoramidites may be dissolved in anhydrous acetonitrile (100 mM) and molecular sieves (3 Å) may be added. 5-Benzylthio-11H-tetrazole (BTT, 250 mM in acetonitrile) or 5-Ethylthio-1H-tetrazole (ETT, 250 mM in acetonitrile) may be used as activator solution. Coupling times may be 9-18 min (e.g. with a GalNAc such as ETL17), 6 min (e.g. with 2′OMe and 2′F). In order to introduce phosphorothioate linkages, a 100 mM solution of 3-phenyl 1,2,4-dithiazoline-5-one (POS, obtained from PolyOrg, Inc., Leominster, Mass., USA) in anhydrous acetonitrile may be employed.

[0320] After solid phase synthesis, the dried solid support may be treated with a 1:1 volume solution of 40 wt. % methylamine in water and 28% ammonium hydroxide solution (Aldrich) for two hours at 30° C. The solution may be evaporated and the solid residue may be reconstituted in water and purified by anionic exchange HPLC using a TKSgel SuperQ-5PW 13u column. Buffer A may be 20 mM Tris, 5 mM EDTA, pH 9.0 and contained 20% Acetonitrile and buffer B may be the same as buffer A with the addition of 1 M sodium chloride. UV traces at 260 nm may be recorded. Appropriate fractions may be pooled then desalted using Sephadex G-25 medium.

[0321] Equimolar amounts of sense and antisense strand may be combined to prepare a duplex. The duplex solution may be prepared in 0.1×PBS (Phosphate-Buffered Saline, 1×, Gibco). The duplex solution may be annealed at 95° C. for 5 min, and cooled to room temperature slowly. Duplex concentration may be determined by measuring the solution absorbance on a UV-Vis spectrometer at 260 nm in 0.1×PBS. For some experiments, a conversion factor may be calculated from an experimentally determined extinction coefficient

### Example 10: GalNAc Ligand for Hepatocyte Targeting of Oligonucleotides

[0322] Without limiting the disclosure to these individual methods, there are at least two general methods for attachment of multivalent N-acetylgalactosamine (GalNAc) ligands to oligonucleotides: solid or solution-phase conjugations. GalNAc ligands may be attached to solid phase resin for 3′ conjugation or at the 5′ terminus using GalNAc phosphoramidite reagents. GalNAc phosphoramidites may be coupled on solid phase as for other nucleosides in the oligonucleotide sequence at any position in the sequence. Reagents for GalNAc conjugation to oligonucleotides are shown in Table 16.

TABLE 16
GalNAc Conjugation Reagents

| Type of | |
|---|---|
| conjugation | Structure |
| Solid phase 3′ attachment where squiggly line is rest of oligonucleotide chain and right-most OH is where attachment to solid phase is. | [chemical structure] |
| | This GalNAc ligand may be referred to as “GalNAc23” or “GalNAc#23.” |
| Solid phase 5′ attachment phosphoramidite | [chemical structure] |
| Solid phase 5′ attachment Phosphoramidite | [chemical structure] |
| Solution phase Carboxylic acid for amide coupling anywhere on oligonucleotide | [chemical structure] |
| | Where Ac is an acetyl group or other hydroxyl protecting group that can be removed |
| | under basic, acid or reducing conditions. |

[0323] In solution phase conjugation, the oligonucleotide sequence-including a reactive conjugation site—is formed on the resin. The oligonucleotide is then removed from the resin and GalNAc is conjugated to the reactive site.

[0324] The carboxy GalNAc derivatives may be coupled to amino-modified oligonucleotides. The peptide coupling conditions are known to the skilled in the art using a carbodiimide coupling agent like DCC (N,N′-Dicyclohexylcarbodiimide), EDC (N-(3-dimethylaminopropyl)-N′-ethylcarbodiimide) or EDC·HCl (N-(3-dimethylaminopropyl)-N′-ethylcarbodiimide hydrochloride and an additive like HOBt (1-hydroxybenztriazole), HOSu (N-hydroxysuccinimide), TBTU (N,N,N′,N′-Tetramethyl-O-(benzotriazol-1-yl)uronium tetrafluoroborate, HBTU (2-(1H-benzotriazol-1-yl)-1,1,3,3-tetramethyluronium hexafluorophosphate) or HOAt (1-Hydroxy-7-azabenzotriazole and common combinations thereof such as TBTU/HOBt or HBTU/HOAt to form activated amine-reactive esters.

[0325] Amine groups may be incorporated into oligonucleotides using a number of known, commercially available reagents at the 5′ terminus, 3′ terminus or anywhere in between

[0326] Non-limiting examples of reagents for oligonucleotide synthesis to incorporate an amino group include:
[0327] 5′ attachment:
[0328] 6-(4-Monomethoxytritylamino)hexyl-(2-cyanoethyl)-(N,N-diisopropyl)-phosphoramidite CAS Number: 114616-27-2
[0329] 5′-Amino-Modifier TEG CE-Phosphoramidite
[0330] 10-(O-trifluoroacetamido-N-ethyl)-triethyleneglycol-1-[(2-cyanoethyl)-(N,N-diisopropyl)]-phosphoramidite
[0331] 3′ attachment:
[0332] 3′-Amino-Modifier Serinol CPG
[0333] 3-Dimethoxytrityloxy-2-(3-(fluorenylmethoxycarbonylamino)propanamido)propyl-1-O-succinyl-long chain alkylamino-CPG (where CPG stands for controlled-pore glass and is the solid support)
[0334] Amino-Modifier Serinol Phosphoramidite
[0335] 3-Dimethoxytrityloxy-2-(3-(fluorenylmethoxycarbonylamino)propanamido)propyl-1-O-(2-cyanoethyl)-(N,N-diisopropyl)-phosphoramidite

### Internal (Base Modified):

[0336] Amino-Modifier C6 dT
[0337] 5′-Dimethoxytrityl-5-[N-(trifluoroacetylaminohexyl)-3-acrylimido]-2′-deoxyUridine,3′-[(2-cyanoethyl)-(N,N-diisopropyl)]-phosphoramidite. CAS Number: 178925-21-8

[0338] Solution phase conjugations may occur after oligonucleotide synthesis via reactions between non-nucleosidic nucleophilic functional groups that are attached to the oligonucleotide and electrophilic GalNAc reagents. Examples of nucleophilic groups include amines and thiols, and examples of electrophilic reagents include activated esters (e.g. N-hydroxysuccinimide, pentafluorophenyl) and maleimides.

### Example 10: GalNAc Ligands for Hepatocyte Targeting of Oligonucleotides

[0339] Without limiting the disclosure to these individual methods, there are at least two general methods for attachment of multivalent N-acetylgalactosamine (GalNAc) ligands to oligonucleotides: solid or solution-phase conjugations. GalNAc ligands may be attached to solid phase resin for 3′ conjugation or at the 5′ terminus using GalNAc phosphoramidite reagents. GalNAc phosphoramidites may be coupled on solid phase as for other nucleosides in the oligonucleotide sequence at any position in the sequence. A non-limiting example of a phosphoramidite reagent for GalNAc conjugation to a 5′ end oligonucleotide is shown in Table 17.

TABLE 17
GalNAc Conjugation Reagent

| Type of | |
|---|---|
| conjugation | Structure |
| Solid phase 5′ attachment phosphora- midite | [chemical structure] |

[0340] The following includes examples of synthesis reactions used to create a GalNAc moiety:

### Scheme for the Preparation of NAcegal-Linker-TMSOTf

### General Procedure for Preparation of Compound 2A

[chemical structure]

[0341] To a solution of Compound 1A (500 g, 4.76 mol, 476 mL) in 2-Methyl-THF (2.00 L) is added CbzCl (406 g, 2.38 mol, 338 mL) in 2-Methyl-THF (750 mL) dropwise at 0° C. The mixture is stirred at 25° C. for 2 hrs under N₂ atmosphere. TLC (DCM: MeOH=20:1, PMA) may indicate CbzCl is consumed completely and one new spot (R_{f}=0.43) formed. The reaction mixture is added HCl/EtOAc (1 N, 180 mL) and stirred for 30 mins, white solid is removed by filtration through celite, the filtrate is concentrated under vacuum to give Compound 2A (540 g, 2.26 mol, 47.5% yield) as a pale yellow oil and used into the next step without further purification. ¹H NMR: δ 7.28-7.41 (m, 5H), 5.55 (br s, 1H), 5.01-5.22 (m, 2H), 3.63-3.80 (m, 2H), 3.46-3.59 (m, 4H), 3.29-3.44 (m, 2H), 2.83-3.02 (m, 1H).

### General Procedure for Preparation of Compound 4A

[chemical structure]

[0342] To a solution of Compound 3A (1.00 kg, 4.64 mol, HCl) in pyridine (5.00 L) is added acetyl acetate (4.73 kg, 46.4 mol, 4.34 L) dropwise at 0° C. under N₂ atmosphere. The mixture is stirred at 25° C. for 16 hrs under N₂ atmosphere. TLC (DCM: MeOH=20:1, PMA) indicated Compound 3A is consumed completely and two new spots (R_{f}=0.35) formed. The reaction mixture is added to cold water (30.0 L) and stirred at 0° C. for 0.5 hr, white solid formed, filtered and dried to give Compound 4A (1.55 kg, 3.98 mol, 85.8% yield) as a white solid and used in the next step without further purification. ¹H NMR: δ 7.90 (d, J 9.29 Hz, 1H), 5.64 (d, J 8.78 Hz, 1H), 5.26 (d, J 3.01 Hz, 1H), 5.06 (dd, J 11.29, 3.26 Hz, 1H), 4.22 (t, J 6.15 Hz, 1H), 3.95-4.16 (m, 3H), 2.12 (s, 3H), 2.03 (s, 3H), 1.99 (s, 3H), 1.90 (s, 3H), 1.78 (s, 3H).

### General Procedure for Preparation of Compound 5A

[chemical structure]

[0343] To a solution of Compound 4A (300 g, 771 mmol) in DCE (1.50 L) is added TMSOTf (257 g, 1.16 mol, 209 mL) and stirred for 2 hrs at 60° C., and then stirred for 1 hr at 25° C. Compound 2A (203 g, 848 mmol) is dissolved in DCE (1.50 L) and added 4 Å powder molecular sieves (150 g) stirring for 30 mins under N₂ atmosphere. Then the solution of Compound 4A in DCE is added dropwise to the mixture at 0° C. The mixture is stirred at 25° C. for 16 hrs under N₂ atmosphere. TLC (DCM: MeOH=25:1, PMA) indicated Compound 4A is consumed completely and new spot (R_{f}=0.24) formed. The reaction mixture is filtered and washed with sat. NaHCO₃ (2.00 L), water (2.00 L) and sat. brine (2.00 L). The organic layer is dried over anhydrous Na₂SO₄, filtered and concentrated under reduced pressure to give a residue. The residue is triturated with 2-Me-THE/heptane (5/3, v/v, 1.80 L) for 2 hrs, filtered and dried to give Compound 5A (225 g, 389 mmol, 50.3% yield, 98.4% purity) as a white solid. ¹H NMR: δ 7.81 (d, J 9.29 Hz, 1H), 7.20-7.42 (m, 6H), 5.21 (d, J 3.26 Hz, 1H), 4.92-5.05 (m, 3H), 4.55 (d, J 8.28 Hz, 1H), 3.98-4.07 (m, 3H), 3.82-3.93 (m, 1H), 3.71-3.81 (m, 1H), 3.55-3.62 (m, 1H), 3.43-3.53 (m, 2H), 3.37-3.43 (m, 2H), 3.14 (q, J 5.77 Hz, 2H), 2.10 (s, 3H), 1.99 (s, 3H), 1.89 (s, 3H), 1.77 (s, 3H).

### General Procedure for Preparation of NAcegal-Linker-Tosylate Salt

[chemical structure]

[0344] To a solution of Compound 5A (200 g, 352 mmol) in THF (1.0 L) is added dry Pd/C (15.0 g, 10% purity) and TsOH (60.6 g, 352 mmol) under N₂ atmosphere. The suspension is degassed under vacuum and purged with H₂ several times. The mixture is stirred at 25° C. for 3 hrs under H₂ (45 psi) atmosphere. TLC (DCM: MeOH=10:1, PMA) indicated Compound 5A is consumed completely and one new spot (R_{f}=0.04) is formed. The reaction mixture is filtered and concentrated (≤40° C.) under reduced pressure to give a residue. Diluted with anhydrous DCM (500 mL, dried overnight with 4 Å molecular sieves (dried at 300° C. for 12 hrs)) and concentrate to give a residue and run Karl Fisher (KF) to check for water content. This is repeated 3 times with anhydrous DCM (500 mL) dilutions and concentration to give NAcegal-Linker-TMSOTf (205 g, 95.8% yield, TsOH salt) as a foamy white solid. ¹H NMR: δ 7.91 (d, J 9.03 Hz, 1H), 7.53-7.86 (m, 2H), 7.49 (d, J 8.03 Hz, 2H), 7.13 (d, J 8.03 Hz, 2H), 5.22 (d, J 3.26 Hz, 1H), 4.98 (dd, J 11.29, 3.26 Hz, 1H), 4.57 (d, J 8.53 Hz, 1H), 3.99-4.05 (m, 3H), 3.87-3.94 (m, 1H), 3.79-3.85 (m, 1H), 3.51-3.62 (m, 5H), 2.96 (br t, J 5.14 Hz, 2H), 2.29 (s, 3H), 2.10 (s, 3H), 2.00 (s, 3H), 1.89 (s, 3H), 1.78 (s, 3H).

### Scheme for the Preparation of TRIS-PEG2-CBZ

[chemical structure]

[chemical structure]

### General Procedure for Preparation of Compound 5B

[chemical structure]

[0345] To a solution of Compound 4B (400 g, 1.67 mol, 1.00 eq) and NaOH (10 M, 16.7 mL, 0.10 eq) in THF (2.00 L) is added Compound 4B_2 (1.07 kg, 8.36 mol, 1.20 L, 5.00 eq), the mixture is stirred at 30° C. for 2 hrs. LCMS showed the desired MS is given. Five batches of solution are combined to one batch, then the mixture is diluted with water (6.00 L), extracted with ethyl acetate (3.00 L*3), the combined organic layer is washed with brine (3.00 L), dried over Na₂SO₄, filtered and concentrated under vacuum. The crude is purified by column chromatography (SiO₂, petroleum ether:ethyl acetate=100:1-10:1, R_{f}=0.5) to give Compound 5B (2.36 kg, 6.43 mol, 76.9% yield) as light yellow oil. HNMR: δ 7.31-7.36 (m, 5H), 5.38 (s, 1H), 5.11-5.16 (m, 2H), 3.75 (t, J=6.4 Hz), 3.54-3.62 (m, 6H), 3.39 (d, J=5.2 Hz), 2.61 (t, J=6.0 Hz).

### General procedure for preparation of 3-oxo-1-phenyl-2,7,10-trioxa-4-azatridecan-13-oic acid (Compound 2B below)

[chemical structure]

[0346] To a solution of Compound 5B (741 g, 2.02 mol, 1.00 eq) in DCM (2.80 L) is added TFA (1.43 kg, 12.5 mol, 928 mL, 6.22 eq), the mixture is stirred at 25° C. for 3 hrs. LCMS showed the desired MS is given. The mixture is diluted with DCM (5.00 L), washed with water (3.00 L*3), brine (2.00 L), the combined organic layer is dried over Na₂SO₄, filtered and concentrated under vacuum to give Compound 2B (1800 g, crude) as light yellow oil. HNMR: δ 9.46 (s, 5H), 7.27-7.34 (m, 5H), 6.50-6.65 (m, 1H), 5.71 (s, 1H), 5.10-5.15 (m, 2H), 3.68-3.70 (m, 14H), 3.58-3.61 (m, 6H), 3.39 (s, 2H), 2.55 (s, 6H), 2.44 (s, 2H).

### General Procedure for Preparation of Compound 3B

[chemical structure]

[0347] To a solution of Compound 2B (375 g, 999 mmol, 83.0% purity, 1.00 eq) in DCM (1.80 L) is added HATU (570 g, 1.50 mol, 1.50 eq) and DIEA (258 g, 2.00 mol, 348 mL, 2.00 eq) at 0° C., the mixture is stirred at 0° C. for 30 min, then Compound 1B (606 g, 1.20 mol, 1.20 eq) is added, the mixture is stirred at 25° C. for 1 hr. LCMS showed desired MS is given. The mixture is combined to one batch, then the mixture is diluted with DCM (5.00 L), washed with 1 N HCl aqueous solution (2.00 L*2), then the organic layer is washed with saturated Na₂CO₃ aqueous solution (2.00 L*2) and brine (2.00 L), the organic layer is dried over Na₂SO₄, filtered and concentrated under vacuum to give Compound 3B (3.88 kg, crude) as yellow oil.

### General Procedure for Preparation of TRIS-PEG2-CBZ

[chemical structure]

[0348] A solution of Compound 3B (775 g, 487 mmol, 50.3% purity, 1.00 eq) in HCl/dioxane (4 M, 2.91 L, 23.8 eq) is stirred at 25° C. for 2 hrs. LCMS showed the desired MS is given. The mixture is concentrated under vacuum to give a residue. Then the combined residue is diluted with DCM (5.00 L), adjusted to pH=8 with 2.5 M NaOH aqueous solution, and separated. The aqueous phase is extracted with DCM (3.00 L) again, then the aqueous solution is adjusted to pH=3 with 1 N HCl aqueous solution, then extracted with DCM (5.00 L*2), the combined organic layer is washed with brine (3.00 L), dried over Na₂SO₄, filtered and concentrated under vacuum. The crude is purified by column chromatography (SiO₂, DCM:MeOH=0:1-12:1, 0.1% HOAc, R_{f}=0.4). The residue is diluted with DCM (5.00 L), adjusted to pH=8 with 2.5 M NaOH aqueous solution, separated, the aqueous solution is extracted with DCM (3.00 L) again, then the aqueous solution is adjusted to pH=3 with 6 N HCl aqueous solution, extracted with DCM:MeOH=10:1 (5.00 L*2), the combined organic layer is washed with brine (2.00 L), dried over Na₂SO₄, filtered and concentrated under vacuum to give a residue. Then the residue is diluted with MeCN (5.00 L), concentrated under vacuum, repeat this procedure twice to remove water to give TRIS-PEG2-CBZ (1.25 kg, 1.91 mol, 78.1% yield, 95.8% purity) as light yellow oil. ¹HNMR: 400 MHz, MeOD, δ 7.30-7.35 (5H), 5.07 (s, 2H), 3.65-3.70 (m, 16H), 3.59 (s, 4H), 3.45 (t, J=5.6 Hz), 2.51 (t, J=6.0 Hz), 2.43 (t, 6.4 Hz).

### Scheme for the Preparation of TriNGal-TRIS-Peg2-Phosph 8c

[chemical structure]

[chemical structure]

[chemical structure]

### TriGNal-TRIS-Peg2-Phosph 8c

### General Procedure for Preparation of Compound 3C

[chemical structure]

[0349] To a solution of Compound 1C (155 g, 245 mmol, 1.00 eq) in ACN (1500 mL) is added TBTU (260 g, 811 mmol, 3.30 eq), DIEA (209 g, 1.62 mol, 282 mL, 6.60 eq) and Compound 2C (492 g, 811 mmol, 3.30 eq, TsOH) at 0° C., the mixture is stirred at 15° C. for 16 hrs. LCMS showed the desired MS is given. The mixture is concentrated under vacuum to give a residue, then the mixture is diluted with DCM (2000 mL), washed with 1 N HCl aqueous solution (700 mL*2), then saturated NaHCO₃ aqueous solution (700 mL*2) and concentrated under vacuum. The crude is purified by column chromatography to give Compound 3C (304 g, 155 mmol, 63.1% yield, 96.0% purity) as a yellow solid.

### General Procedure for Preparation of Compound 4C

[chemical structure]

[0350] Two batches solution of Compound 3C (55.0 g, 29.2 mmol, 1.00 eq) in MeOH (1600 mL) is added Pd/C (6.60 g, 19.1 mmol, 10.0% purity) and TFA (3.34 g, 29.2 mmol, 2.17 mL, 1.00 eq), the mixture is degassed under vacuum and purged with H₂. The mixture is stirred under H₂ (15 psi) at 15° C. for 2 hours. LCMS showed the desired MS is given. The mixture is filtered and the filtrate is concentrated under vacuum to give Compound 4C (106 g, 54.8 mmol, 93.7% yield, 96.2% purity, TFA) as a white solid.

### General Procedure for Preparation of Compound 5C

[chemical structure]

[0351] Two batches in parallel. To a solution of EDCI (28.8 g, 150 mmol, 1.00 eq) in DCM (125 mL) is added compound 4a (25.0 g, 150 mmol, 1.00 eq) dropwise at 0° C., then the mixture is added to compound 4 (25.0 g, 150 mmol, 1.00 eq) in DCM (125 mL) at 0° C., then the mixture is stirred at 25° C. for 1 hr. TLC (Petroleum ether:Ethyl acetate=3:1, R_{f}=0.45) showed the reactant is consumed and one new spot is formed. The reaction mixture is diluted with DCM (100 mL) then washed with aq.NaHCO₃ (250 mL*1) and brine (250 mL), dried over Na₂SO₄, filtered and concentrated under reduced pressure to give a residue. The residue is purified by column chromatography (SiO₂, Petroleum ether:Ethyl acetate=100:1 to 3:1), TLC (SiO₂, Petroleum ether:Ethyl acetate=3:1), R_{f}=0.45, then concentrated under reduced pressure to give a residue. Compound 5C (57.0 g, 176 mmol, 58.4% yield, 96.9% purity) is obtained as colorless oil and confirmed ¹HNMR: EW33072-2-P1A, 400 MHz, DMSO b 9.21 (s, 1H), 7.07-7.09 (m, 2H), 6.67-6.70 (m, 2H), 3.02-3.04 (m, 2H), 2.86-2.90 (m, 2H)

### General Procedure for Preparation of Compound 6

[chemical structure]

[0352] To a mixture of compound 3 (79.0 g, 41.0 mmol, 96.4% purity, 1.00 eq, TFA) and compound 6C (14.2 g, 43.8 mmol, 96.9% purity, 1.07 eq) in DCM (800 mL) is added TEA (16.6 g, 164 mmol, 22.8 mL, 4.00 eq) dropwise at 0° C., the mixture is stirred at 15° C. for 16 hrs. LCMS (EW33072-12-P1B, Rt=0.844 min) showed the desired mass is detected. The reaction mixture is diluted with DCM (400 mL) and washed with aq. NaHCO₃ (400 mL*1) and brine (400 mL*1), then the mixture is diluted with DCM (2.00 L) and washed with 0.7 M Na₂CO₃ (1000 mL*3) and brine (800 mL*3), dried over Na₂SO₄, filtered and concentrated under reduced pressure to give a residue. The residue is used to next step directly without purification. Compound 6 (80.0 g, crude) is obtained as white solid and confirmed via ¹HNMR: EW33072-12-P1A, 400 MHz, MeOD δ 7.02-7.04 (m, 2H), 6.68-6.70 (m, 2H), 5.34-5.35 (s, 3H), 5.07-5.08 (d, J=4.00 Hz, 3H), 4.62-4.64 (d, J=8.00 Hz, 3H), 3.71-4.16 (m, 16H), 3.31-3.70 (m, 44H), 2.80-2.83 (m, 2H), 2.68 (m, 2H), 2.46-2.47 (m, 10H), 2.14 (s, 9H), 2.03 (s, 9H), 1.94-1.95 (d, J=4.00 Hz, 18H).

### General Procedure for Preparation of TriGNal-TRIS-Peg2-Phosph 8c

[chemical structure]

[0353] Two batches are synthesized in parallel. To a solution of compound 6C (40.0 g, 21.1 mmol, 1.00 eq in DCM (600 mL) is added diisopropylammonium tetrazolide (3.62 g, 21.1 mmol, 1.00 eq) and compound 7c (6.37 g, 21.1 mmol, 6.71 mL, 1.00 eq) in DCM (8.00 mL) drop-wise, the mixture is stirred at 30° C. for 1 hr, then added compound 7c (3.18 g, 10.6 mmol, 3.35 mL, 0.50 eq) in DCM (8.00 mL) drop-wise, the mixture is stirred at 30° C. for 30 mins, then added compound 7c (3.18 g, 10.6 mmol, 3.35 mL, 0.50 eq) in DCM (8.00 mL) drop-wise, the mixture is stirred at 30° C. for 1.5 hrs. LCMS (EW33072-17-P1C1, Rt=0.921 mi) showed the desired MS+1 is detected. LCMS (EW33072-17-P1C2, Rt=0.919 min) showed the desired MS+1 is detected. Two batches are combined for work-up. The mixture is diluted with DCM (1.20 L), washed with saturated NaHCO₃ aqueous solution (1.60 L*2), 3% DMF in H₂O (1.60 L*2), H₂O (1.60 L*3), brine (1.60 L), dried over Na₂SO₄, filtered and concentrated under reduced pressure to give a residue. The residue is purified by column chromatography (SiO₂, DCM: MeOH:TEA=100:3:2) TLC (SiO₂, DCM: MeOH=10:1, R_{f}=0.45), then concentrated under reduced pressure to give a residue. Compound 8C (76.0 g, 34.8 mmol, 82.5% yield, 96.0% purity) is obtained as white solid and confirmed via ¹HNMR: EW33072-19-P1C, 400 MHz, MeOD δ 7.13-7.15 (d, J=8.50 Hz, 2H), 6.95-6.97 (dd, J=8.38, 1.13 Hz, 2H), 5.34 (d, J=2.88 Hz, 3H), 0.09 (dd, J=11.26, 3.38 Hz, 3H), 4.64 (d, J=8.50 Hz, 3H), 3.99-4.20 (m, 12H), 3.88-3.98 (m, 5H), 3.66-3.83 (m, 20H), 3.51-3.65 (m, 17H), 3.33-3.50 (m, 9H), 2.87 (t, J=7.63 Hz, 2H), 2.76 (t, J=5.94 Hz, 2H), 2.42-2.50 (m, 10H), 2.14 (s, 9H), 2.03 (s, 9H), 1.94-1.95 (d, J=6.13 Hz, 18H), 1.24-1.26 (d, J=6.75 Hz, 6H), 1.18-1.20 (d, J=6.75 Hz, 6H).

### Example 11: Modification Motif 1

[0354] An example HGFAC siRNA includes a combination of the following modifications:
[0355] Position 9 (from 5′ to 3′) of the sense strand is 2′F.
[0356] If position 9 is a pyrimidine then all purines in the Sense Strand are 2′OMe, and 1-5 pyrimidines between positions 5 and 11 are 2′F provided that there are never three 2′F modifications in a row.
[0357] If position 9 is a purine then all pyrimidines in the Sense Strand are 2′OMe, and 1-5 purines between positions 5 and 11 are 2′F provided that there are never three 2′F modifications in a row.

[0358] Antisense strand odd-numbered positions are 2′OMe and even-numbered positions are a mixture of 2′F, 2′OMe and 2′deoxy.

### Example 12: Modification Motif 2

[0359] An example HGFAC siRNA includes a combination of the following modifications:
[0360] Position 9 (from 5′ to 3′) of the sense strand is 2′deoxy.
[0361] Sense strand positions 5, 7 and 8 are 2′F.
[0362] All pyrimidines in positions 10-21 are 2′OMe, and purines are a mixture of 2′OMe and 2′F. Alternatively, all purines in positions 10-21 are 2′OMe and all pyrimidines in positions 10-21 are a mixture of 2′OMe and 2′F.
[0363] Antisense strand odd-numbered positions are 2′OMe and even-numbered positions are a mixture of 2′F, 2′OMe and 2′deoxy.

### Example 13. Efficacy Evaluation of ETD02258 Alone and in Combination with Anti-mPD-L1 Against Subcutaneous CT26 WT Murine Colon Carcinoma in Female Balb/c Mice

[0364] Four groups (n=20/group) of female Balb/c mice (Envigo) at age 6-7 weeks were utilized for this study. All mice were sorted into study groups based on body weight. The mice were distributed to ensure that the body weight for all groups was within 10% of the overall mean body weight for the study population.

[0365] On study Day 0, approximately 500,000 cells of the mouse colorectal adenocarcinoma cell line CT26.WT (ATCC CRL-2638) was injected subcutaneously at a volume of 200 μL into the upper right axilla of each animal. The treatment regimen was started in all groups on study Day 3. Group 1 mice were subcutaneously injected with 100 μL of 1×PBS as a vehicle control on study Days 3, 10, and 17. Group 2 mice were injected subcutaneously with 100 μL of ETD02258 (sense strand, [ETL17]saugcUfuUfGfAfugaaacacgasusu [SEQ ID NO: 4822]; antisense strand, usCfsgUfgUfuUfcAfuCfaAfaGfcAfususu [SEQ ID NO: 4823]) formulated in PBS at a concentration of 2 mg/mL (200 μg total siRNA) on study Days 3, 10, and 17. Group 3 mice were injected intraperitoneally with an anti-mPD-L1 monoclonal antibody (Clone 10F.9G2) reconstituted in Dulbecco's PBS at a concentration of 1 mg/mL on study Days 3,6,10,13,17, and 20. Animals treated with antibody were dosed by full body weight (10 mg/kg). Group 4 mice were treated with combined treatment regimens from Groups 2 and 3. Complete dosing schedules are summarized in Table 18.

[0366] All treatments were well tolerated. There were no deaths in the treatment window, and body weight change in the treatment window ranged from of 16.0% to 20.5% body weight gain (Table 19).

[0367] In study Days 2,4,7,9,11,14,16,18, 21, and 23, tumor volumes were taken by caliper measurements and calculated using the formula: Tumor burden (mm³)=(L×W²)/2; where L and W are the respective orthogonal tumor length and width measurements (mm). Results are shown in Table 20.

[0368] From the tumor volume measurements, additional study endpoints to assess treatment efficacy were determined. Day 21 was chosen for endpoint evaluation because this was the final day all animals on study were measured. 1000 mm³ was selected for Time to Progression (TTP) evaluation because the majority of control animals reached this criterion prior to end of life sampling. Differences in tumor size in the control group compared to the treatment group were determined by comparing the ratio of ΔT/ΔC, where ΔC and ΔT are individual animal endpoints calculated for each animal as follows:
[0369] ΔT=Tₜ−T₀ and ΔC=Cₜ−C₀,
[0370] where Tₜ and T₀ are the tumor volumes of a treated animal at time t or at the initiation of dosing, respectively. ΔC reflects similar calculations for the control animals. Median ΔT/ΔC is a group endpoint calculated for each day of treatment as:
[0371] Median ΔT/ΔC=(ΔT_{med}/ΔC_{med})*100

[0372] The results are presented as a percentage. Lower ΔT/ΔC values reflect a smaller overall tumor burden in a group compared to the control group. Time to progression is an individual endpoint and can be used as a surrogate for lifespan or time on study. The selected tumor evaluation size is tumor model and study dependent. TP data is analyzed by Kaplan Meier methods just as traditional lifespan data. The time to progression for an individual animal is the number of days between initiation of treatment and death or the day that the animal reaches a selected evaluation size and may be “>” if animals survive to study termination if the evaluation size is not reached. Results are summarized in Table 21. Single agent therapy with either ETD02258 at 200 ug/animal (Group 2) or anti-mPD-L1 at 10 mg/kg (Group 3) did not result in anti-cancer activity. These treatments resulted in an increase in time to progression of −5 and 0% respectively. Combination therapy with ETD02258 at 200 ug/animal and anti-mPD-L1 at 10 mg/kg (Group 4) outperformed either single agent and resulted in anti-cancer activity. This treatment resulted in an increase in time to progression of >16.6% and significantly less tumor burden at study Day 21.

[0373] On either study Day 24 or when animal tumor burden reached a predetermined threshold of 2000 mm³, animals were euthanized and an approximately 30 mg piece of liver excised from each aminal for assessment of target mRNA reduction by RT-qPCR. Liver pieces were placed in 10 v/v RNAlater™ Stabilization Solution (Thermo Fisher, Catalog #AM7020) and stored for at 4° C. until they were shipped to Empirico. The liver samples were processed in homogenization buffer (Maxwell RSC simplyRNA Tissue Kit) using Soft Tissue Homogenizing Kit CK14 (Bertin Instruments, catalog #P000933-LYSKO-A) in a Percellys 24 tissue homogenizer (Bertin Instruments) set at 5000 rpm for two 10 second cycles. Total RNA from the liver lysate was purified on a Maxwell RSC 48 platform (Promega Corporation) according to the manufacturer's recommendations. Preparation of cDNA was performed using Quanta qScript cDNA SuperMix (VWR, Catalog #95048-500) according to the manufacturer's instructions. The relative levels of liver HGFAC mRNA were assessed in biplexed reactions by RT-qPCR in triplicate using TaqMan assays for mouse HGFAC (ThermoFisher, assay #Mm00469483 ml) and the mouse housekeeping gene PPIA (ThermoFisher, assay #Mm02342430_g1) in PerfeCTa qPCRFastMix Reaction Mix (VWR). The samples were assessed on a QuantStudio™ 6 Pro Real-Time PCR System. The delta-delta Ct method was used to calculate relative amounts of HGFAC mRNA. Group mean relative HGFAC mRNA levels relative to the PBS control Group 1 are shown in Table 22. Treatment with 200 μg of the test article ETD02258 resulted in a decrease in the liver levels of HGFAC mRNA in Groups 2 and 4 compared to untreated control Group 1 and anti-mPD-L1 treated Group 3.

TABLE 18
Dosing Schedule

| | | | | | | Treatment |
|---|---|---|---|---|---|---|
| Group | N | Treatment | Dose | | ROA | Day(s) |
| 1 | 20 | PBS | 100 | μL/injection | SC | 3, 10, 17 |
| 2 | 20 | ETD02258 | 200 | μg/animal | SC | 3, 10, 17 |
| 3 | 20 | anti-mPD-L1 | 10 | mg/kg | IP | 3, 6, 10, |
| | | | | | | 13, 17, 20 |

| | | | | | |
|---|---|---|---|---|---|
| 4 | 20 | anti-mPD-L1 + | 10 mg/kg | IP | 3, 6, 10, |
| | | ETD02258 | 200 μg/animal | SC | 13, 17, 20 |
| | | | | | 3, 10, 17 |

TABLE 19
Mean Body Weights

| | | | Day | | | | | | | | | |
|---|---|---|---|---|---|---|---|---|---|---|---|---|
| | | | 2 | 4 | 7 | 9 | 11 | 14 | 16 | 18 | 21 | 23 |
| Group | n | Treatment | Mean Body Weights (g) | | | | | | | | | |
| 1 | 20 | PBS | 16.8 | 16.7 | 16.9 | 17.2 | 17.4 | 17.9 | 18.5 | 18.8 | 20 | 19.5 |
| 2 | 20 | ETD02258 | 16.9 | 16.8 | 17.0 | 17.2 | 17.2 | 17.7 | 18.5 | 18.9 | 20.2 | 20.3 |
| 3 | 20 | anti-mPD-L1 | 17.3 | 17.2 | 17.4 | 17.6 | 17.7 | 18.2 | 18.6 | 18.9 | 19.7 | 20.0 |
| 4 | 20 | anti-mPD-L1 + | 16.8 | 16.8 | 16.9 | 17.2 | 17.2 | 17.6 | 18 | 18.1 | 18.6 | 19.2 |
| | | ETD02258 | | | | | | | | | | |

TABLE 20
Mean Tumor Volumes

| | | | Day | | | | | | | | | |
|---|---|---|---|---|---|---|---|---|---|---|---|---|
| | | | 2 | 4 | 7 | 9 | 11 | 14 | 16 | 18 | 21 | 23 |
| Group | n | Treatment | Mean Tumor Volumes (mm³) | | | | | | | | | |
| 1 | 20 | PBS | 0 | 10 | 38 | 91 | 176 | 350 | 555 | 786 | 1325 | 1413 |
| 2 | 20 | ETD02258 | 0 | 12 | 41 | 84 | 155 | 286 | 525 | 710 | 1320 | 1589 |
| 3 | 20 | anti-mPD-L1 | 0 | 10 | 42 | 87 | 134 | 255 | 387 | 627 | 981 | 1290 |
| 4 | 20 | anti-mPD-L1 + | 0 | 16 | 60 | 106 | 143 | 224 | 345 | 464 | 559 | 1003 |
| | | ETD02258 | | | | | | | | | | |

TABLE 21
Endpoint Treatment Efficacy Measurements

| | | | | | | Increased |
|---|---|---|---|---|---|---|
| | | | Median Tumor | Tumor Growth | Median | Time to |
| | | | Volume at day | Inhibition | ΔT/ΔC day | Progression |
| Group | n | Treatment | 21 (mm³) | (%) | 21 (%) | (%) |
| 1 | 26 | PBS | 956 | NA | NA | NA |
| 2 | 26 | ETD02258 | 1198 | 0.00 | 125.00 | −5.5 |
| 3 | 26 | anti-mPD-L1 | 926 | 5.00 | 96.00 | 0.00 |
| 4 | 26 | anti-mPD-L1 + | 362 | 62.00 | 37.00 | >16.6 |
| | | ETD02258 | | | | |

TABLE 22
Relative HGFAC mRNA Level in Liver of Mice

| | | | Mean HGFAC mRNA |
|---|---|---|---|
| Group | n | Treatment | (Relative to Group 1) |
| 1 | 20 | PBS | 1.000 |
| 2 | 20 | ETD02258 | 0.071 |
| 3 | 20 | anti-mPD-L1 | 0.570 |
| 4 | 20 | anti-mPD-L1 + ETD02258 | 0.030 |

### Example 14: Protective Variants in HGFAC Result in Altered Levels of Both Cytosolic and Secreted HGFAC

[0374] The cDNA of HGFAC protein-coding transcript ENST00000382774.8 was cloned into the pcDNA3.1(+) cDNA expression vector driven by a constitutive CMV promoter. Representative variants from the gene burden test were selected for evaluation. WT (wild-type), C237W (rs201082880), R241X (rs780551152), and L582R (rs138538142) constructs were generated.

[0375] Lipid-based plasmid transfection of AR-PE-19 (RPE) cells was used to collect samples to test the functional consequence of HGFAC variants. 5×10⁵ RPE cells were plated in a 6-well dish with DMEM/F12+1000 FBS and grown for 48 hours. Cells were then transfected with 3 μg of each plasmid DNA and 6 μl of Lipofectamine-2000 (a mock-transfected well was included as a control). 48 hours post-transfection, unfiltered culture media was collected for enzyme-linked imuunoassay (ELISA), and cell pellets were collected for RNA and protein isolation. Transfections and analyses were done in biological triplicate.

[0376] qPCR of poly-A and random-hexamer primed cDNA from isolated RNA of transfected RPE cells indicates robust overexpression of HGFAC mRNA (FIG. 1A). 400 ng of total RNA was used for cDNA synthesis via Bio-Rad's iScript kit. Expression of HGFAC was assessed via SYBR Green and target-specific primers for HGFAC using an ABI QuantStudio5 Pro. Expression was quantified by the ΔΔCt method and normalized to ACTB. Fold change is reported relative to mock-transfected control. No obvious differences were observed in the expression of HGFAC mRNA between WT and and of the variant constructs.

[0377] Whole cell protein lysates (WCL) from transfected cells were evaluated for intracellular HGFAC protein by western blot (FIG. 1B). In mock transfected RPE cells, HGFAC was not detectable. In cells transfected with WT, HGFAC was detected by western blot as a band of ˜80 kDa. In cells transfected with the R241X stop gain variant, HGFAC was reduced in molecular weight to ˜50 kDa and its amount was substantially reduced by western blot compared with wild type. In cells transfected with the C237W or L582R missense variants, HGFAC showed elevated levels and this increase was confirmed by quantitative densitometry (FIG. 1C).

[0378] ELISAs of culture media from transfected RPE cells demonstrate significant decreases in secreted HGFAC for all three variants relative to WT (FIG. 1D). 100 μL of unfiltered media collected from transfected culture wells was used as input in a commercial sandwich ELISA assay (R&D Systems). Concentrations of secreted HGFAC were imputed from a four-parameter logistic fit of HGFAC standards reconstituted in PBS with 10% FBS.

[0379] These data provide experimental verification that representative variants from the cancer-protective HGFAC burden test resulted in either a decrease in total HGFAC levels (R241X) or a decreased capacity to secrete HGFAC protein (C237W and L582R). Additionally, the R241X stop gain variant resulted in a truncated protein.

### Example 15. Testing the Activity of HGFAC siRNA ETD02395 with Alternative Modifications in Mice Transfected with AAV8-TBG-h-HGFAC

[0380] The activities of siRNAs with alternative modification patterns of ETD02395, namely ETD02519-ETD02528, were assessed. The siRNAs were attached to the GalNAc ligand ETL17 followed by a phosphorothioate linkage at the 5′ end of the sense strand. The siRNAs used in this Example are included in Table 23, where Nf (e.g. Af, Cf, Gf, Tf, or Uf) is a 2′ fluoro-modified nucleoside, n (e.g. a, c, g, t, or u) is a 2′ O-methyl modified nucleoside, “d” is a 2′ deoxynucleoside dN (e.g. dA, dC, dG, dT, or dU), Nm (e.g. Am, Cm, Gm, Tm, or Um) is a 2′ methoxyethyl modified nucleoside, and “s” is a phosphorothioate linkage. The base sequences for each siRNA, with and without the 3′ UU extension, are shown in Table 24.

[0381] Six to eight week old female mice (C57Bl/6) were injected with 5 μL of a recombinant adeno-associated virus 8 (AAV8) vector (1.8×10E13 genome copies/mL) by the retroorbital or tail vein route. The recombinant AAV8 contained the open reading frame and the majority of the 3′UTR of the human HGFAC sequence (GenBank Accession #BC 112190) under the control of the human thyroxine binding globulin promoter in an AAV2 backbone packaged in AAV8 capsid (AAV8-TBG-h-HGFAC).

[0382] On Day 16 after infection mice were given a subcutaneous injection of a single 100 μg dose of a GalNAc-conjugated siRNA or PBS as vehicle control. On Day 12 after subcutaneous injection, mice were euthanized and a liver sample from each was collected and placed in RNAlater (ThermoFisher Cat #AM7020) until processing. Total liver RNA was prepared by homogenizing the liver tissue in homogenization buffer (Maxwell RSC simplyRNA Tissue Kit) using a Percellys 24 tissue homogenizer (Bertin Instruments) set at 5000 rpm for two 10 second cycles. Total RNA from the lysate was purified on a Maxwell RSC 48 platform (Promega Corporation) according to the manufacturer's recommendations. Preparation of cDNA was performed using Quanta qScript cDNA SuperMix (VWR, Catalog #95048-500) according to the manufacturer's instructions. The relative levels of liver HGFAC mRNA were assessed by RT-qPCR in triplicate on a QuantStudio™ 6 Pro Real-Time PCR System using TaqMan assays for human HGFAC (ThermoFisher, assay #HsOa173526_ml), mouse HGFAC (ThermoFisher, assay #Mm00469483_ml), and the mouse housekeeping gene PPIA (ThermoFisher, assay #Mm02342430_g1) and PerfeCTa® qPCR FastMix®, Low ROX™ (VWR, Catalog #101419-222). Mice with undetectable hHGFAC expression were omitted from further analysis. Data were normalized to the level in animals receiving PBS. The qPCR results using the probe for virally expressed human HGFAC are shown in Table 25, and the qPCR results using the probe for endogenous mouse HGFAC are shown in Table 26.

TABLE 23
Example siRNA Sequences

| | SEQ | Sense Strand Sequence | SEQ | |
|---|---|---|---|---|
| siRNA | ID | (5′-3′) with | ID | Antisense Strand |
| Name | NO: | GalNAc moiety | NO: | Sequence (5′-3′) |
| ETD02395 | 4560 | [ETL17]scuauGfuGfgAfcug | 4497 | usUfsuGfaUfcCfaGfuCfcA |
| | | gaucaaasusu | | fcAfuAfgsusu |
| ETD02519 | 4804 | [ETL17]scuaTmgUfGfGfAf | 4497 | usUfsuGfaUfcCfaGfuCfcA |
| | | cuggmaucaaasusu | | fcAfuAfgsusu |
| ETD02520 | 4805 | [ETL17]scuaTmgUfGfGfAf | 4497 | usUfsuGfaUfcCfaGfuCfcA |
| | | cugmgaucaaasusu | | fcAfuAfgsusu |
| ETD02521 | 4806 | [ETL17]scuauGfuGfgAfcug | 4814 | usUfsugaUfcCfaGfuCfcAfc |
| | | gaucaaasusu | | AfuAfgsusu |
| ETD02522 | 4807 | [ETL17]scuauGfuGfgAfcug | 4815 | usUfsugaUfcCfaGfuccAfc |
| | | gaucaaasusu | | AfuAfgsusu |
| ETD02523 | 4808 | [ETL17]scuauGfuGfgAfcug | 4816 | usUfsugaUfcCfaGfuccAfc |
| | | gaucaaasusu | | Afuagsusu |
| ETD02524 | 4809 | [ETL17]scuauGfuGfgAfcug | 4817 | usUfsugaUfCfcaGfuCfcAfc |
| | | gaucaaasusu | | AfuAfgsusu |
| ETD02525 | 4810 | [ETL17]scuauGfuGfgAfcug | 4818 | usUfsugauCfcaGfuCfcAfc |
| | | gaucaaasusu | | AfuAfgsusu |
| ETD02526 | 4811 | [ETL17]scuauGfuGfgAfcug | 4819 | usUfsugAfuCfcaGfuCfcAfc |
| | | gaucaaasusu | | AfuAfgsusu |
| ETD02527 | 4812 | [ETL17]scuauGfuGfgAfcug | 4820 | usUfsugAfuCfcaGfuccAfc |
| | | gaucaaasusu | | AfuAfgsusu |
| ETD02528 | 4813 | [ETL17]scuauGfuGfgAfcug | 4821 | usUfsugAfuCfcAfguccAfc |
| | | gaucaaasusu | | Afuagsusu |

TABLE 24
Example siRNA BASE Sequences

| | SEQ | Sense Strand | SEQ | Antisense Strand |
|---|---|---|---|---|
| siRNA | ID | Base Sequence | ID | Base Sequence |
| Name | NO: | (5′ to 3′) | NO: | (5′ to 3′) |
| ETD02395 | 4599 | CUAUGUGGACUGGAUCAAAUU | 4654 | UUUGAUCCAGUCCACAUAGUU |
| ETD02519 | 4599 | CUAUGUGGACUGGAUCAAAUU | 4654 | UUUGAUCCAGUCCACAUAGUU |
| ETD02520 | 4599 | CUAUGUGGACUGGAUCAAAUU | 4654 | UUUGAUCCAGUCCACAUAGUU |
| ETD02521 | 4599 | CUAUGUGGACUGGAUCAAAUU | 4654 | UUUGAUCCAGUCCACAUAGUU |
| ETD02522 | 4599 | CUAUGUGGACUGGAUCAAAUU | 4654 | UUUGAUCCAGUCCACAUAGUU |
| ETD02523 | 4599 | CUAUGUGGACUGGAUCAAAUU | 4654 | UUUGAUCCAGUCCACAUAGUU |
| ETD02524 | 4599 | CUAUGUGGACUGGAUCAAAUU | 4654 | UUUGAUCCAGUCCACAUAGUU |
| ETD02525 | 4599 | CUAUGUGGACUGGAUCAAAUU | 4654 | UUUGAUCCAGUCCACAUAGUU |
| ETD02526 | 4599 | CUAUGUGGACUGGAUCAAAUU | 4654 | UUUGAUCCAGUCCACAUAGUU |
| ETD02527 | 4599 | CUAUGUGGACUGGAUCAAAUU | 4654 | UUUGAUCCAGUCCACAUAGUU |
| ETD02528 | 4599 | CUAUGUGGACUGGAUCAAAUU | 4654 | UUUGAUCCAGUCCACAUAGUU |
| | | Sense Strand | | Antisense Strand |
| | SEQ | Base Sequence | SEQ | Base Sequence |
| siRNA | ID | (5′ to 3′), | ID | (5′ to 3′), |
| Name | NO: | without 3′ overhangs | NO: | without 3′ overhangs |
| ETD02395 | 4615 | CUAUGUGGACUGGAUCAAA | 4670 | UUUGAUCCAGUCCACAUAG |
| ETD02519 | 4615 | CUAUGUGGACUGGAUCAAA | 4670 | UUUGAUCCAGUCCACAUAG |
| ETD02520 | 4615 | CUAUGUGGACUGGAUCAAA | 4670 | UUUGAUCCAGUCCACAUAG |
| ETD02521 | 4615 | CUAUGUGGACUGGAUCAAA | 4670 | UUUGAUCCAGUCCACAUAG |
| ETD02522 | 4615 | CUAUGUGGACUGGAUCAAA | 4670 | UUUGAUCCAGUCCACAUAG |
| ETD02523 | 4615 | CUAUGUGGACUGGAUCAAA | 4670 | UUUGAUCCAGUCCACAUAG |
| ETD02524 | 4615 | CUAUGUGGACUGGAUCAAA | 4670 | UUUGAUCCAGUCCACAUAG |
| ETD02525 | 4615 | CUAUGUGGACUGGAUCAAA | 4670 | UUUGAUCCAGUCCACAUAG |
| ETD02526 | 4615 | CUAUGUGGACUGGAUCAAA | 4670 | UUUGAUCCAGUCCACAUAG |
| ETD02527 | 4615 | CUAUGUGGACUGGAUCAAA | 4670 | UUUGAUCCAGUCCACAUAG |
| ETD02528 | 4615 | CUAUGUGGACUGGAUCAAA | 4670 | UUUGAUCCAGUCCACAUAG |

TABLE 25
Relative Human HGFAC mRNA Levels in Livers of AAV8-
TBG-h-HGFAC Mice on Day 12 After siRNA Injection

| | | | Dose | Mean Human HGFAC mRNA |
|---|---|---|---|---|
| Group | n | Treatment | (ug) | (Relative to Group 1, Day 12) |
| 1 | 4 | PBS | | 1.00 |
| 2 | 4 | ETD02395 | 100 | 0.64 |
| 3 | 5 | ETD02519 | 100 | 1.97 |
| 4 | 5 | ETD02520 | 100 | 0.29 |
| 5 | 5 | ETD02521 | 100 | 0.19 |
| 6 | 4 | ETD02522 | 100 | 1.57 |
| 7 | 5 | ETD02523 | 100 | 1.68 |
| 8 | 5 | ETD02524 | 100 | 0.47 |
| 9 | 5 | ETD02525 | 100 | 0.49 |
| 10 | 5 | ETD02526 | 100 | 1.05 |
| 11 | 5 | ETD02527 | 100 | 1.31 |
| 12 | 5 | ETD02528 | 100 | 1.42 |

TABLE 25
Relative Mouse HGFAC mRNA Levels in Livers of AAV8-
TBG-h-HGFAC Mice on Day 12 After siRNA Injection

| | | | Dose | Mean Mouse HGFAC mRNA |
|---|---|---|---|---|
| Group | n | Treatment | (ug) | (Relative to Group 1, Day 12) |
| 1 | 4 | PBS | | 1.00 |
| 2 | 4 | ETD02395 | 100 | 0.14 |
| 3 | 5 | ETD02519 | 100 | 0.15 |
| 4 | 5 | ETD02520 | 100 | 0.12 |
| 5 | 5 | ETD02521 | 100 | 0.08 |
| 6 | 4 | ETD02522 | 100 | 0.13 |
| 7 | 5 | ETD02523 | 100 | 0.21 |
| 8 | 5 | ETD02524 | 100 | 0.12 |
| 9 | 5 | ETD02525 | 100 | 0.16 |
| 10 | 5 | ETD02526 | 100 | 0.13 |
| 11 | 5 | ETD02527 | 100 | 0.10 |
| 12 | 5 | ETD02528 | 100 | 0.12 |

[0383] While preferred embodiments of the present invention have been shown and described herein, it will be obvious to those skilled in the art that such embodiments are provided by way of example only. Numerous variations, changes, and substitutions will now occur to those skilled in the art without departing from the invention. It should be understood that various alternatives to the embodiments of the invention described herein may be employed in practicing the invention. It is intended that the following claims define the scope of the invention and that methods and compositions within the scope of these claims and their equivalents be covered thereby.

### IV. Sequence Information

[0384] Some embodiments include one or more nucleic acid sequences in the following tables:

Sequence Information

| SEQ ID NO: | Description |
|---|---|
| 1-2051 | HGFAC siRNA sense strand sequences |
| 2052-4102 | HGFAC siRNA antisense strand sequences |
| 4103-4207 | Modified HGFAC siRNA sense strand sequences |
| 4208-4233 | Modified HGFAC siRNA antisense strand sequences |
| 4234-4319 | Modified HGFAC siRNA sense sequences |
| 4320-4354 | Modified HGFAC siRNA antisense sequences |
| 4355-4482 | Modified HGFAC siRNA sense sequences |
| 4483-4499 | Modified HGFAC siRNA antisense sequences |
| 4500-4561 | Modified HGFAC sense sequences |
| 4562-4616 | HGFAC siRNA sense strand sequences |
| 4617-4671 | HGFAC siRNA antisense strand sequences |
| 4672-4711 | Modified HGFAC siRNA sense sequences |
| 4712-4756 | Modified HGFAC siRNA antisense sequences |
| 4757-4779 | HGFAC siRNA sense strand sequences |
| 4780-4802 | HGFAC siRNA antisense strand sequences |
| 4803 | Full-length human HGFAC mRNA sequence (Ensembl |
| | transcript ENST00000382774.8) |
| 4804-4813 | Modified HGFAC siRNA sense sequences |
| 4814-4821 | Modified HGFAC siRNA antisense sequences |

| siRNA | SEQ ID | sense strand | SEQ ID | antisense strand |
|---|---|---|---|---|
| Name | NO: | sequence (5'-3') | NO: | sequence (5'-3') |
| siRNA 1 | 1 | GCCUCCCACUGCCCCUCAG | 2052 | CUGAGGGGCAGUGGGAGGC |
| siRNA 2 | 2 | CCUCCCACUGCCCCUCAGG | 2053 | CCUGAGGGGCAGUGGGAGG |
| siRNA 3 | 3 | CUCCCACUGCCCCUCAGGC | 2054 | GCCUGAGGGGCAGUGGGAG |
| siRNA 4 | 4 | UCCCACUGCCCCUCAGGCC | 2055 | GGCCUGAGGGGCAGUGGGA |
| siRNA 5 | 5 | CCCACUGCCCCUCAGGCCA | 2056 | UGGCCUGAGGGGCAGUGGG |
| siRNA 6 | 6 | CCACUGCCCCUCAGGCCAG | 2057 | CUGGCCUGAGGGGCAGUGG |
| siRNA 7 | 7 | CACUGCCCCUCAGGCCAGC | 2058 | GCUGGCCUGAGGGGCAGUG |
| siRNA 8 | 8 | ACUGCCCCUCAGGCCAGCU | 2059 | AGCUGGCCUGAGGGGCAGU |
| siRNA 9 | 9 | CUGCCCCUCAGGCCAGCUC | 2060 | GAGCUGGCCUGAGGGGCAG |
| siRNA 10 | 10 | UGCCCCUCAGGCCAGCUCA | 2061 | UGAGCUGGCCUGAGGGGCA |
| siRNA 11 | 11 | GCCCCUCAGGCCAGCUCAG | 2062 | CUGAGCUGGCCUGAGGGGC |
| siRNA 12 | 12 | CCCCUCAGGCCAGCUCAGG | 2063 | CCUGAGCUGGCCUGAGGGG |
| siRNA 13 | 13 | CCCUCAGGCCAGCUCAGGA | 2064 | UCCUGAGCUGGCCUGAGGG |
| siRNA 14 | 14 | CCUCAGGCCAGCUCAGGAG | 2065 | CUCCUGAGCUGGCCUGAGG |
| siRNA 15 | 15 | CUCAGGCCAGCUCAGGAGC | 2066 | GCUCCUGAGCUGGCCUGAG |
| siRNA 16 | 16 | UCAGGCCAGCUCAGGAGCC | 2067 | GGCUCCUGAGCUGGCCUGA |
| siRNA 17 | 17 | CAGGCCAGCUCAGGAGCCA | 2068 | UGGCUCCUGAGCUGGCCUG |
| siRNA 18 | 18 | AGGCCAGCUCAGGAGCCAU | 2069 | AUGGCUCCUGAGCUGGCCU |
| siRNA 19 | 19 | GGCCAGCUCAGGAGCCAUG | 2070 | CAUGGCUCCUGAGCUGGCC |
| siRNA 20 | 20 | GCCAGCUCAGGAGCCAUGG | 2071 | CCAUGGCUCCUGAGCUGGC |
| siRNA 21 | 21 | CCAGCUCAGGAGCCAUGGG | 2072 | CCCAUGGCUCCUGAGCUGG |
| siRNA 22 | 22 | CAGCUCAGGAGCCAUGGGG | 2073 | CCCCAUGGCUCCUGAGCUG |
| siRNA 23 | 23 | AGCUCAGGAGCCAUGGGGC | 2074 | GCCCCAUGGCUCCUGAGCU |
| siRNA 24 | 24 | GCUCAGGAGCCAUGGGGCG | 2075 | CGCCCCAUGGCUCCUGAGC |
| siRNA 25 | 25 | CUCAGGAGCCAUGGGGCGC | 2076 | GCGCCCCAUGGCUCCUGAG |
| siRNA 26 | 26 | UCAGGAGCCAUGGGGCGCU | 2077 | AGCGCCCCAUGGCUCCUGA |
| siRNA 27 | 27 | CAGGAGCCAUGGGGCGCUG | 2078 | CAGCGCCCCAUGGCUCCUG |
| siRNA 28 | 28 | AGGAGCCAUGGGGCGCUGG | 2079 | CCAGCGCCCCAUGGCUCCU |
| siRNA 29 | 29 | GGAGCCAUGGGGCGCUGGG | 2080 | CCCAGCGCCCCAUGGCUCC |
| siRNA 30 | 30 | GAGCCAUGGGGCGCUGGGC | 2081 | GCCCAGCGCCCCAUGGCUC |
| siRNA 31 | 31 | AGCCAUGGGGCGCUGGGCC | 2082 | GGCCCAGCGCCCCAUGGCU |
| siRNA 32 | 32 | GCCAUGGGGCGCUGGGCCU | 2083 | AGGCCCAGCGCCCCAUGGC |
| siRNA 33 | 33 | CCAUGGGGCGCUGGGCCUG | 2084 | CAGGCCCAGCGCCCCAUGG |
| siRNA 34 | 34 | CAUGGGGCGCUGGGCCUGG | 2085 | CCAGGCCCAGCGCCCCAUG |
| siRNA 35 | 35 | AUGGGGCGCUGGGCCUGGG | 2086 | CCCAGGCCCAGCGCCCCAU |
| siRNA 36 | 36 | UGGGGCGCUGGGCCUGGGU | 2087 | ACCCAGGCCCAGCGCCCCA |
| siRNA 37 | 37 | GGGGCGCUGGGCCUGGGUC | 2088 | GACCCAGGCCCAGCGCCCC |
| siRNA 38 | 38 | GGGCGCUGGGCCUGGGUCC | 2089 | GGACCCAGGCCCAGCGCCC |
| siRNA 39 | 39 | GGCGCUGGGCCUGGGUCCC | 2090 | GGGACCCAGGCCCAGCGCC |
| siRNA 40 | 40 | GCGCUGGGCCUGGGUCCCC | 2091 | GGGGACCCAGGCCCAGCGC |
| siRNA 41 | 41 | CGCUGGGCCUGGGUCCCCA | 2092 | UGGGGACCCAGGCCCAGCG |
| siRNA 42 | 42 | GCUGGGCCUGGGUCCCCAG | 2093 | CUGGGGACCCAGGCCCAGC |
| siRNA 43 | 43 | CUGGGCCUGGGUCCCCAGC | 2094 | GCUGGGGACCCAGGCCCAG |
| siRNA 44 | 44 | UGGGCCUGGGUCCCCAGCC | 2095 | GGCUGGGGACCCAGGCCCA |
| siRNA 45 | 45 | GGGCCUGGGUCCCCAGCCC | 2096 | GGGCUGGGGACCCAGGCCC |
| siRNA 46 | 46 | GGCCUGGGUCCCCAGCCCC | 2097 | GGGGCUGGGGACCCAGGCC |
| siRNA 47 | 47 | GCCUGGGUCCCCAGCCCCU | 2098 | AGGGGCUGGGGACCCAGGC |
| siRNA 48 | 48 | CCUGGGUCCCCAGCCCCUG | 2099 | CAGGGGCUGGGGACCCAGG |
| siRNA 49 | 49 | CUGGGUCCCCAGCCCCUGG | 2100 | CCAGGGGCUGGGGACCCAG |
| siRNA 50 | 50 | UGGGUCCCCAGCCCCUGGC | 2101 | GCCAGGGGCUGGGGACCCA |
| siRNA 51 | 51 | GGGUCCCCAGCCCCUGGCC | 2102 | GGCCAGGGGCUGGGGACCC |
| siRNA 52 | 52 | GGUCCCCAGCCCCUGGCCC | 2103 | GGGCCAGGGGCUGGGGACC |
| siRNA 53 | 53 | GUCCCCAGCCCCUGGCCCC | 2104 | GGGGCCAGGGGCUGGGGAC |
| siRNA 54 | 54 | UCCCCAGCCCCUGGCCCCC | 2105 | GGGGGCCAGGGGCUGGGGA |
| siRNA 55 | 55 | CCCCAGCCCCUGGCCCCCA | 2106 | UGGGGGCCAGGGGCUGGGG |
| siRNA 56 | 56 | CCCAGCCCCUGGCCCCCAC | 2107 | GUGGGGGCCAGGGGCUGGG |
| siRNA 57 | 57 | CCAGCCCCUGGCCCCCACC | 2108 | GGUGGGGGCCAGGGGCUGG |
| siRNA 58 | 58 | CAGCCCCUGGCCCCCACCG | 2109 | CGGUGGGGGCCAGGGGCUG |
| siRNA 59 | 59 | AGCCCCUGGCCCCCACCGG | 2110 | CCGGUGGGGGCCAGGGGCU |
| siRNA 60 | 60 | GCCCCUGGCCCCCACCGGG | 2111 | CCCGGUGGGGGCCAGGGGC |
| siRNA 61 | 61 | CCCCUGGCCCCCACCGGGG | 2112 | CCCCGGUGGGGGCCAGGGG |
| siRNA 62 | 62 | CCCUGGCCCCCACCGGGGC | 2113 | GCCCCGGUGGGGGCCAGGG |
| siRNA 63 | 63 | CCUGGCCCCCACCGGGGCU | 2114 | AGCCCCGGUGGGGGCCAGG |
| siRNA 64 | 64 | CUGGCCCCCACCGGGGCUG | 2115 | CAGCCCCGGUGGGGGCCAG |
| siRNA 65 | 65 | UGGCCCCCACCGGGGCUGG | 2116 | CCAGCCCCGGUGGGGGCCA |
| siRNA 66 | 66 | GGCCCCCACCGGGGCUGGG | 2117 | CCCAGCCCCGGUGGGGGCC |
| siRNA 67 | 67 | GCCCCCACCGGGGCUGGGC | 2118 | GCCCAGCCCCGGUGGGGGC |
| siRNA 68 | 68 | CCCCCACCGGGGCUGGGCC | 2119 | GGCCCAGCCCCGGUGGGGG |
| siRNA 69 | 69 | CCCCACCGGGGCUGGGCCC | 2120 | GGGCCCAGCCCCGGUGGGG |
| siRNA 70 | 70 | CCCACCGGGGCUGGGCCCC | 2121 | GGGGCCCAGCCCCGGUGGG |
| siRNA 71 | 71 | CCACCGGGGCUGGGCCCCU | 2122 | AGGGGCCCAGCCCCGGUGG |
| siRNA 72 | 72 | CACCGGGGCUGGGCCCCUU | 2123 | AAGGGGCCCAGCCCCGGUG |
| siRNA 73 | 73 | ACCGGGGCUGGGCCCCUUC | 2124 | GAAGGGGCCCAGCCCCGGU |
| siRNA 74 | 74 | CCGGGGCUGGGCCCCUUCC | 2125 | GGAAGGGGCCCAGCCCCGG |
| siRNA 75 | 75 | CGGGGCUGGGCCCCUUCCU | 2126 | AGGAAGGGGCCCAGCCCCG |
| siRNA 76 | 76 | GGGGCUGGGCCCCUUCCUC | 2127 | GAGGAAGGGGCCCAGCCCC |
| siRNA 77 | 77 | GGGCUGGGCCCCUUCCUCC | 2128 | GGAGGAAGGGGCCCAGCCC |
| siRNA 78 | 78 | GGCUGGGCCCCUUCCUCCU | 2129 | AGGAGGAAGGGGCCCAGCC |
| siRNA 79 | 79 | GCUGGGCCCCUUCCUCCUC | 2130 | GAGGAGGAAGGGGCCCAGC |
| siRNA 80 | 80 | CUGGGCCCCUUCCUCCUCC | 2131 | GGAGGAGGAAGGGGCCCAG |
| siRNA 81 | 81 | UGGGCCCCUUCCUCCUCCU | 2132 | AGGAGGAGGAAGGGGCCCA |
| siRNA 82 | 82 | GGGCCCCUUCCUCCUCCUC | 2133 | GAGGAGGAGGAAGGGGCCC |
| siRNA 83 | 83 | GGCCCCUUCCUCCUCCUCC | 2134 | GGAGGAGGAGGAAGGGGCC |
| siRNA 84 | 84 | GCCCCUUCCUCCUCCUCCU | 2135 | AGGAGGAGGAGGAAGGGGC |
| siRNA 85 | 85 | CCCCUUCCUCCUCCUCCUC | 2136 | GAGGAGGAGGAGGAAGGGG |
| siRNA 86 | 86 | CCCUUCCUCCUCCUCCUCC | 2137 | GGAGGAGGAGGAGGAAGGG |
| siRNA 87 | 87 | CCUUCCUCCUCCUCCUCCU | 2138 | AGGAGGAGGAGGAGGAAGG |
| siRNA 88 | 88 | CUUCCUCCUCCUCCUCCUG | 2139 | CAGGAGGAGGAGGAGGAAG |
| siRNA 89 | 89 | UUCCUCCUCCUCCUCCUGC | 2140 | GCAGGAGGAGGAGGAGGAA |
| siRNA 90 | 90 | UCCUCCUCCUCCUCCUGCU | 2141 | AGCAGGAGGAGGAGGAGGA |
| siRNA 91 | 91 | CCUCCUCCUCCUCCUGCUG | 2142 | CAGCAGGAGGAGGAGGAGG |
| siRNA 92 | 92 | CUCCUCCUCCUCCUGCUGC | 2143 | GCAGCAGGAGGAGGAGGAG |
| siRNA 93 | 93 | UCCUCCUCCUCCUGCUGCU | 2144 | AGCAGCAGGAGGAGGAGGA |
| siRNA 94 | 94 | CCUCCUCCUCCUGCUGCUG | 2145 | CAGCAGCAGGAGGAGGAGG |
| siRNA 95 | 95 | CUCCUCCUCCUGCUGCUGC | 2146 | GCAGCAGCAGGAGGAGGAG |
| siRNA 96 | 96 | UCCUCCUCCUGCUGCUGCU | 2147 | AGCAGCAGCAGGAGGAGGA |
| siRNA 97 | 97 | CCUCCUCCUGCUGCUGCUG | 2148 | CAGCAGCAGCAGGAGGAGG |
| siRNA 98 | 98 | CUCCUCCUGCUGCUGCUGC | 2149 | GCAGCAGCAGCAGGAGGAG |
| siRNA 99 | 99 | UCCUCCUGCUGCUGCUGCU | 2150 | AGCAGCAGCAGCAGGAGGA |
| siRNA 100 | 100 | CCUCCUGCUGCUGCUGCUG | 2151 | CAGCAGCAGCAGCAGGAGG |
| siRNA 101 | 101 | CUCCUGCUGCUGCUGCUGC | 2152 | GCAGCAGCAGCAGCAGGAG |
| siRNA 102 | 102 | UCCUGCUGCUGCUGCUGCU | 2153 | AGCAGCAGCAGCAGCAGGA |
| siRNA 103 | 103 | CCUGCUGCUGCUGCUGCUG | 2154 | CAGCAGCAGCAGCAGCAGG |
| siRNA 104 | 104 | CUGCUGCUGCUGCUGCUGC | 2155 | GCAGCAGCAGCAGCAGCAG |
| siRNA 105 | 105 | UGCUGCUGCUGCUGCUGCC | 2156 | GGCAGCAGCAGCAGCAGCA |
| siRNA 106 | 106 | GCUGCUGCUGCUGCUGCCA | 2157 | UGGCAGCAGCAGCAGCAGC |
| siRNA 107 | 107 | CUGCUGCUGCUGCUGCCAC | 2158 | GUGGCAGCAGCAGCAGCAG |
| siRNA 108 | 108 | UGCUGCUGCUGCUGCCACG | 2159 | CGUGGCAGCAGCAGCAGCA |
| siRNA 109 | 109 | GCUGCUGCUGCUGCCACGG | 2160 | CCGUGGCAGCAGCAGCAGC |
| siRNA 110 | 110 | CUGCUGCUGCUGCCACGGG | 2161 | CCCGUGGCAGCAGCAGCAG |
| siRNA 111 | 111 | UGCUGCUGCUGCCACGGGG | 2162 | CCCCGUGGCAGCAGCAGCA |
| siRNA 112 | 112 | GCUGCUGCUGCCACGGGGG | 2163 | CCCCCGUGGCAGCAGCAGC |
| siRNA 113 | 113 | CUGCUGCUGCCACGGGGGU | 2164 | ACCCCCGUGGCAGCAGCAG |
| siRNA 114 | 114 | UGCUGCUGCCACGGGGGUU | 2165 | AACCCCCGUGGCAGCAGCA |
| siRNA 115 | 115 | GCUGCUGCCACGGGGGUUC | 2166 | GAACCCCCGUGGCAGCAGC |
| siRNA 116 | 116 | CUGCUGCCACGGGGGUUCC | 2167 | GGAACCCCCGUGGCAGCAG |
| siRNA 117 | 117 | UGCUGCCACGGGGGUUCCA | 2168 | UGGAACCCCCGUGGCAGCA |
| siRNA 118 | 118 | GCUGCCACGGGGGUUCCAG | 2169 | CUGGAACCCCCGUGGCAGC |
| siRNA 119 | 119 | CUGCCACGGGGGUUCCAGC | 2170 | GCUGGAACCCCCGUGGCAG |
| siRNA 120 | 120 | UGCCACGGGGGUUCCAGCC | 2171 | GGCUGGAACCCCCGUGGCA |
| siRNA 121 | 121 | GCCACGGGGGUUCCAGCCC | 2172 | GGGCUGGAACCCCCGUGGC |
| siRNA 122 | 122 | CCACGGGGGUUCCAGCCCC | 2173 | GGGGCUGGAACCCCCGUGG |
| siRNA 123 | 123 | CACGGGGGUUCCAGCCCCA | 2174 | UGGGGCUGGAACCCCCGUG |
| siRNA 124 | 124 | ACGGGGGUUCCAGCCCCAG | 2175 | CUGGGGCUGGAACCCCCGU |
| siRNA 125 | 125 | CGGGGGUUCCAGCCCCAGC | 2176 | GCUGGGGCUGGAACCCCCG |
| siRNA 126 | 126 | GGGGGUUCCAGCCCCAGCC | 2177 | GGCUGGGGCUGGAACCCCC |
| siRNA 127 | 127 | GGGGUUCCAGCCCCAGCCU | 2178 | AGGCUGGGGCUGGAACCCC |
| siRNA 128 | 128 | GGGUUCCAGCCCCAGCCUG | 2179 | CAGGCUGGGGCUGGAACCC |
| siRNA 129 | 129 | GGUUCCAGCCCCAGCCUGG | 2180 | CCAGGCUGGGGCUGGAACC |
| siRNA 130 | 130 | GUUCCAGCCCCAGCCUGGC | 2181 | GCCAGGCUGGGGCUGGAAC |
| siRNA 131 | 131 | UUCCAGCCCCAGCCUGGCG | 2182 | CGCCAGGCUGGGGCUGGAA |
| siRNA 132 | 132 | UCCAGCCCCAGCCUGGCGG | 2183 | CCGCCAGGCUGGGGCUGGA |
| siRNA 133 | 133 | CCAGCCCCAGCCUGGCGGG | 2184 | CCCGCCAGGCUGGGGCUGG |
| siRNA 134 | 134 | CAGCCCCAGCCUGGCGGGA | 2185 | UCCCGCCAGGCUGGGGCUG |
| siRNA 135 | 135 | AGCCCCAGCCUGGCGGGAA | 2186 | UUCCCGCCAGGCUGGGGCU |
| siRNA 136 | 136 | GCCCCAGCCUGGCGGGAAC | 2187 | GUUCCCGCCAGGCUGGGGC |
| siRNA 137 | 137 | CCCCAGCCUGGCGGGAACC | 2188 | GGUUCCCGCCAGGCUGGGG |
| siRNA 138 | 138 | CCCAGCCUGGCGGGAACCG | 2189 | CGGUUCCCGCCAGGCUGGG |
| siRNA 139 | 139 | CCAGCCUGGCGGGAACCGU | 2190 | ACGGUUCCCGCCAGGCUGG |
| siRNA 140 | 140 | CAGCCUGGCGGGAACCGUA | 2191 | UACGGUUCCCGCCAGGCUG |
| siRNA 141 | 141 | AGCCUGGCGGGAACCGUAC | 2192 | GUACGGUUCCCGCCAGGCU |
| siRNA 142 | 142 | GCCUGGCGGGAACCGUACG | 2193 | CGUACGGUUCCCGCCAGGC |
| siRNA 143 | 143 | CCUGGCGGGAACCGUACGG | 2194 | CCGUACGGUUCCCGCCAGG |
| siRNA 144 | 144 | CUGGCGGGAACCGUACGGA | 2195 | UCCGUACGGUUCCCGCCAG |
| siRNA 145 | 145 | UGGCGGGAACCGUACGGAG | 2196 | CUCCGUACGGUUCCCGCCA |
| siRNA 146 | 146 | GGCGGGAACCGUACGGAGU | 2197 | ACUCCGUACGGUUCCCGCC |
| siRNA 147 | 147 | GCGGGAACCGUACGGAGUC | 2198 | GACUCCGUACGGUUCCCGC |
| siRNA 148 | 148 | CGGGAACCGUACGGAGUCC | 2199 | GGACUCCGUACGGUUCCCG |
| siRNA 149 | 149 | GGGAACCGUACGGAGUCCC | 2200 | GGGACUCCGUACGGUUCCC |
| siRNA 150 | 150 | GGAACCGUACGGAGUCCCC | 2201 | GGGGACUCCGUACGGUUCC |
| siRNA 151 | 151 | GAACCGUACGGAGUCCCCA | 2202 | UGGGGACUCCGUACGGUUC |
| siRNA 152 | 152 | AACCGUACGGAGUCCCCAG | 2203 | CUGGGGACUCCGUACGGUU |
| siRNA 153 | 153 | ACCGUACGGAGUCCCCAGA | 2204 | UCUGGGGACUCCGUACGGU |
| siRNA 154 | 154 | CCGUACGGAGUCCCCAGAA | 2205 | UUCUGGGGACUCCGUACGG |
| siRNA 155 | 155 | CGUACGGAGUCCCCAGAAC | 2206 | GUUCUGGGGACUCCGUACG |
| siRNA 156 | 156 | GUACGGAGUCCCCAGAACC | 2207 | GGUUCUGGGGACUCCGUAC |
| siRNA 157 | 157 | UACGGAGUCCCCAGAACCU | 2208 | AGGUUCUGGGGACUCCGUA |
| siRNA 158 | 158 | ACGGAGUCCCCAGAACCUA | 2209 | UAGGUUCUGGGGACUCCGU |
| siRNA 159 | 159 | CGGAGUCCCCAGAACCUAA | 2210 | UUAGGUUCUGGGGACUCCG |
| siRNA 160 | 160 | GGAGUCCCCAGAACCUAAU | 2211 | AUUAGGUUCUGGGGACUCC |
| siRNA 161 | 161 | GAGUCCCCAGAACCUAAUG | 2212 | CAUUAGGUUCUGGGGACUC |
| siRNA 162 | 162 | AGUCCCCAGAACCUAAUGC | 2213 | GCAUUAGGUUCUGGGGACU |
| siRNA 163 | 163 | GUCCCCAGAACCUAAUGCC | 2214 | GGCAUUAGGUUCUGGGGAC |
| siRNA 164 | 164 | UCCCCAGAACCUAAUGCCA | 2215 | UGGCAUUAGGUUCUGGGGA |
| siRNA 165 | 165 | CCCCAGAACCUAAUGCCAC | 2216 | GUGGCAUUAGGUUCUGGGG |
| siRNA 166 | 166 | CCCAGAACCUAAUGCCACA | 2217 | UGUGGCAUUAGGUUCUGGG |
| siRNA 167 | 167 | CCAGAACCUAAUGCCACAG | 2218 | CUGUGGCAUUAGGUUCUGG |
| siRNA 168 | 168 | CAGAACCUAAUGCCACAGC | 2219 | GCUGUGGCAUUAGGUUCUG |
| siRNA 169 | 169 | AGAACCUAAUGCCACAGCG | 2220 | CGCUGUGGCAUUAGGUUCU |
| siRNA 170 | 170 | GAACCUAAUGCCACAGCGA | 2221 | UCGCUGUGGCAUUAGGUUC |
| siRNA 171 | 171 | AACCUAAUGCCACAGCGAC | 2222 | GUCGCUGUGGCAUUAGGUU |
| siRNA 172 | 172 | ACCUAAUGCCACAGCGACC | 2223 | GGUCGCUGUGGCAUUAGGU |
| siRNA 173 | 173 | CCUAAUGCCACAGCGACCC | 2224 | GGGUCGCUGUGGCAUUAGG |
| siRNA 174 | 174 | CUAAUGCCACAGCGACCCC | 2225 | GGGGUCGCUGUGGCAUUAG |
| siRNA 175 | 175 | UAAUGCCACAGCGACCCCU | 2226 | AGGGGUCGCUGUGGCAUUA |
| siRNA 176 | 176 | AAUGCCACAGCGACCCCUG | 2227 | CAGGGGUCGCUGUGGCAUU |
| siRNA 177 | 177 | AUGCCACAGCGACCCCUGC | 2228 | GCAGGGGUCGCUGUGGCAU |
| siRNA 178 | 178 | UGCCACAGCGACCCCUGCG | 2229 | CGCAGGGGUCGCUGUGGCA |
| siRNA 179 | 179 | GCCACAGCGACCCCUGCGA | 2230 | UCGCAGGGGUCGCUGUGGC |
| siRNA 180 | 180 | CCACAGCGACCCCUGCGAU | 2231 | AUCGCAGGGGUCGCUGUGG |
| siRNA 181 | 181 | CACAGCGACCCCUGCGAUC | 2232 | GAUCGCAGGGGUCGCUGUG |
| siRNA 182 | 182 | ACAGCGACCCCUGCGAUCC | 2233 | GGAUCGCAGGGGUCGCUGU |
| siRNA 183 | 183 | CAGCGACCCCUGCGAUCCC | 2234 | GGGAUCGCAGGGGUCGCUG |
| siRNA 184 | 184 | AGCGACCCCUGCGAUCCCC | 2235 | GGGGAUCGCAGGGGUCGCU |
| siRNA 185 | 185 | GCGACCCCUGCGAUCCCCA | 2236 | UGGGGAUCGCAGGGGUCGC |
| siRNA 186 | 186 | CGACCCCUGCGAUCCCCAC | 2237 | GUGGGGAUCGCAGGGGUCG |
| siRNA 187 | 187 | GACCCCUGCGAUCCCCACU | 2238 | AGUGGGGAUCGCAGGGGUC |
| siRNA 188 | 188 | ACCCCUGCGAUCCCCACUA | 2239 | UAGUGGGGAUCGCAGGGGU |
| siRNA 189 | 189 | CCCCUGCGAUCCCCACUAU | 2240 | AUAGUGGGGAUCGCAGGGG |
| siRNA 190 | 190 | CCCUGCGAUCCCCACUAUC | 2241 | GAUAGUGGGGAUCGCAGGG |
| siRNA 191 | 191 | CCUGCGAUCCCCACUAUCC | 2242 | GGAUAGUGGGGAUCGCAGG |
| siRNA 192 | 192 | CUGCGAUCCCCACUAUCCU | 2243 | AGGAUAGUGGGGAUCGCAG |
| siRNA 193 | 193 | UGCGAUCCCCACUAUCCUG | 2244 | CAGGAUAGUGGGGAUCGCA |
| siRNA 194 | 194 | GCGAUCCCCACUAUCCUGG | 2245 | CCAGGAUAGUGGGGAUCGC |
| siRNA 195 | 195 | CGAUCCCCACUAUCCUGGU | 2246 | ACCAGGAUAGUGGGGAUCG |
| siRNA 196 | 196 | GAUCCCCACUAUCCUGGUG | 2247 | CACCAGGAUAGUGGGGAUC |
| siRNA 197 | 197 | AUCCCCACUAUCCUGGUGA | 2248 | UCACCAGGAUAGUGGGGAU |
| siRNA 198 | 198 | UCCCCACUAUCCUGGUGAC | 2249 | GUCACCAGGAUAGUGGGGA |
| siRNA 199 | 199 | CCCCACUAUCCUGGUGACC | 2250 | GGUCACCAGGAUAGUGGGG |
| siRNA 200 | 200 | CCCACUAUCCUGGUGACCU | 2251 | AGGUCACCAGGAUAGUGGG |
| siRNA 201 | 201 | CCACUAUCCUGGUGACCUC | 2252 | GAGGUCACCAGGAUAGUGG |
| siRNA 202 | 202 | CACUAUCCUGGUGACCUCU | 2253 | AGAGGUCACCAGGAUAGUG |
| siRNA 203 | 203 | ACUAUCCUGGUGACCUCUG | 2254 | CAGAGGUCACCAGGAUAGU |
| siRNA 204 | 204 | CUAUCCUGGUGACCUCUGU | 2255 | ACAGAGGUCACCAGGAUAG |
| siRNA 205 | 205 | UAUCCUGGUGACCUCUGUG | 2256 | CACAGAGGUCACCAGGAUA |
| siRNA 206 | 206 | AUCCUGGUGACCUCUGUGA | 2257 | UCACAGAGGUCACCAGGAU |
| siRNA 207 | 207 | UCCUGGUGACCUCUGUGAC | 2258 | GUCACAGAGGUCACCAGGA |
| siRNA 208 | 208 | CCUGGUGACCUCUGUGACC | 2259 | GGUCACAGAGGUCACCAGG |
| siRNA 209 | 209 | CUGGUGACCUCUGUGACCU | 2260 | AGGUCACAGAGGUCACCAG |
| siRNA 210 | 210 | UGGUGACCUCUGUGACCUC | 2261 | GAGGUCACAGAGGUCACCA |
| siRNA 211 | 211 | GGUGACCUCUGUGACCUCU | 2262 | AGAGGUCACAGAGGUCACC |
| siRNA 212 | 212 | GUGACCUCUGUGACCUCUG | 2263 | CAGAGGUCACAGAGGUCAC |
| siRNA 213 | 213 | UGACCUCUGUGACCUCUGA | 2264 | UCAGAGGUCACAGAGGUCA |
| siRNA 214 | 214 | GACCUCUGUGACCUCUGAG | 2265 | CUCAGAGGUCACAGAGGUC |
| siRNA 215 | 215 | ACCUCUGUGACCUCUGAGA | 2266 | UCUCAGAGGUCACAGAGGU |
| siRNA 216 | 216 | CCUCUGUGACCUCUGAGAC | 2267 | GUCUCAGAGGUCACAGAGG |
| siRNA 217 | 217 | CUCUGUGACCUCUGAGACC | 2268 | GGUCUCAGAGGUCACAGAG |
| siRNA 218 | 218 | UCUGUGACCUCUGAGACCC | 2269 | GGGUCUCAGAGGUCACAGA |
| siRNA 219 | 219 | CUGUGACCUCUGAGACCCC | 2270 | GGGGUCUCAGAGGUCACAG |
| siRNA 220 | 220 | UGUGACCUCUGAGACCCCA | 2271 | UGGGGUCUCAGAGGUCACA |
| siRNA 221 | 221 | GUGACCUCUGAGACCCCAG | 2272 | CUGGGGUCUCAGAGGUCAC |
| siRNA 222 | 222 | UGACCUCUGAGACCCCAGC | 2273 | GCUGGGGUCUCAGAGGUCA |
| siRNA 223 | 223 | GACCUCUGAGACCCCAGCA | 2274 | UGCUGGGGUCUCAGAGGUC |
| siRNA 224 | 224 | ACCUCUGAGACCCCAGCAA | 2275 | UUGCUGGGGUCUCAGAGGU |
| siRNA 225 | 225 | CCUCUGAGACCCCAGCAAC | 2276 | GUUGCUGGGGUCUCAGAGG |
| siRNA 226 | 226 | CUCUGAGACCCCAGCAACA | 2277 | UGUUGCUGGGGUCUCAGAG |
| siRNA 227 | 227 | UCUGAGACCCCAGCAACAA | 2278 | UUGUUGCUGGGGUCUCAGA |
| siRNA 228 | 228 | CUGAGACCCCAGCAACAAG | 2279 | CUUGUUGCUGGGGUCUCAG |
| siRNA 229 | 229 | UGAGACCCCAGCAACAAGU | 2280 | ACUUGUUGCUGGGGUCUCA |
| siRNA 230 | 230 | GAGACCCCAGCAACAAGUG | 2281 | CACUUGUUGCUGGGGUCUC |
| siRNA 231 | 231 | AGACCCCAGCAACAAGUGC | 2282 | GCACUUGUUGCUGGGGUCU |
| siRNA 232 | 232 | GACCCCAGCAACAAGUGCU | 2283 | AGCACUUGUUGCUGGGGUC |
| siRNA 233 | 233 | ACCCCAGCAACAAGUGCUC | 2284 | GAGCACUUGUUGCUGGGGU |
| siRNA 234 | 234 | CCCCAGCAACAAGUGCUCC | 2285 | GGAGCACUUGUUGCUGGGG |
| siRNA 235 | 235 | CCCAGCAACAAGUGCUCCA | 2286 | UGGAGCACUUGUUGCUGGG |
| siRNA 236 | 236 | CCAGCAACAAGUGCUCCAG | 2287 | CUGGAGCACUUGUUGCUGG |
| siRNA 237 | 237 | CAGCAACAAGUGCUCCAGA | 2288 | UCUGGAGCACUUGUUGCUG |
| siRNA 238 | 238 | AGCAACAAGUGCUCCAGAG | 2289 | CUCUGGAGCACUUGUUGCU |
| SiRNA 239 | 239 | GCAACAAGUGCUCCAGAGG | 2290 | CCUCUGGAGCACUUGUUGC |
| siRNA 240 | 240 | CAACAAGUGCUCCAGAGGC | 2291 | GCCUCUGGAGCACUUGUUG |
| siRNA 241 | 241 | AACAAGUGCUCCAGAGGCA | 2292 | UGCCUCUGGAGCACUUGUU |
| siRNA 242 | 242 | ACAAGUGCUCCAGAGGCAG | 2293 | CUGCCUCUGGAGCACUUGU |
| siRNA 243 | 243 | CAAGUGCUCCAGAGGCAGA | 2294 | UCUGCCUCUGGAGCACUUG |
| siRNA 244 | 244 | AAGUGCUCCAGAGGCAGAG | 2295 | CUCUGCCUCUGGAGCACUU |
| siRNA 245 | 245 | AGUGCUCCAGAGGCAGAGG | 2296 | CCUCUGCCUCUGGAGCACU |
| siRNA 246 | 246 | GUGCUCCAGAGGCAGAGGG | 2297 | CCCUCUGCCUCUGGAGCAC |
| siRNA 247 | 247 | UGCUCCAGAGGCAGAGGGA | 2298 | UCCCUCUGCCUCUGGAGCA |
| siRNA 248 | 248 | GCUCCAGAGGCAGAGGGAC | 2299 | GUCCCUCUGCCUCUGGAGC |
| siRNA 249 | 249 | CUCCAGAGGCAGAGGGACC | 2300 | GGUCCCUCUGCCUCUGGAG |
| siRNA 250 | 250 | UCCAGAGGCAGAGGGACCC | 2301 | GGGUCCCUCUGCCUCUGGA |
| siRNA 251 | 251 | CCAGAGGCAGAGGGACCCC | 2302 | GGGGUCCCUCUGCCUCUGG |
| siRNA 252 | 252 | CAGAGGCAGAGGGACCCCA | 2303 | UGGGGUCCCUCUGCCUCUG |
| siRNA 253 | 253 | AGAGGCAGAGGGACCCCAA | 2304 | UUGGGGUCCCUCUGCCUCU |
| siRNA 254 | 254 | GAGGCAGAGGGACCCCAAA | 2305 | UUUGGGGUCCCUCUGCCUC |
| siRNA 255 | 255 | AGGCAGAGGGACCCCAAAG | 2306 | CUUUGGGGUCCCUCUGCCU |
| siRNA 256 | 256 | GGCAGAGGGACCCCAAAGU | 2307 | ACUUUGGGGUCCCUCUGCC |
| siRNA 257 | 257 | GCAGAGGGACCCCAAAGUG | 2308 | CACUUUGGGGUCCCUCUGC |
| siRNA 258 | 258 | CAGAGGGACCCCAAAGUGG | 2309 | CCACUUUGGGGUCCCUCUG |
| siRNA 259 | 259 | AGAGGGACCCCAAAGUGGG | 2310 | CCCACUUUGGGGUCCCUCU |
| siRNA 260 | 260 | GAGGGACCCCAAAGUGGGG | 2311 | CCCCACUUUGGGGUCCCUC |
| siRNA 261 | 261 | AGGGACCCCAAAGUGGGGG | 2312 | CCCCCACUUUGGGGUCCCU |
| siRNA 262 | 262 | GGGACCCCAAAGUGGGGGG | 2313 | CCCCCCACUUUGGGGUCCC |
| siRNA 263 | 263 | GGACCCCAAAGUGGGGGGC | 2314 | GCCCCCCACUUUGGGGUCC |
| siRNA 264 | 264 | GACCCCAAAGUGGGGGGCU | 2315 | AGCCCCCCACUUUGGGGUC |
| siRNA 265 | 265 | ACCCCAAAGUGGGGGGCUC | 2316 | GAGCCCCCCACUUUGGGGU |
| siRNA 266 | 266 | CCCCAAAGUGGGGGGCUCC | 2317 | GGAGCCCCCCACUUUGGGG |
| siRNA 267 | 267 | CCCAAAGUGGGGGGCUCCC | 2318 | GGGAGCCCCCCACUUUGGG |
| siRNA 268 | 268 | CCAAAGUGGGGGGCUCCCG | 2319 | CGGGAGCCCCCCACUUUGG |
| siRNA 269 | 269 | CAAAGUGGGGGGCUCCCGC | 2320 | GCGGGAGCCCCCCACUUUG |
| siRNA 270 | 270 | AAAGUGGGGGGCUCCCGCC | 2321 | GGCGGGAGCCCCCCACUUU |
| siRNA 271 | 271 | AAGUGGGGGGCUCCCGCCC | 2322 | GGGCGGGAGCCCCCCACUU |
| siRNA 272 | 272 | AGUGGGGGGCUCCCGCCCC | 2323 | GGGGCGGGAGCCCCCCACU |
| siRNA 273 | 273 | GUGGGGGGCUCCCGCCCCC | 2324 | GGGGGCGGGAGCCCCCCAC |
| siRNA 274 | 274 | UGGGGGGCUCCCGCCCCCG | 2325 | CGGGGGCGGGAGCCCCCCA |
| siRNA 275 | 275 | GGGGGGCUCCCGCCCCCGC | 2326 | GCGGGGGCGGGAGCCCCCC |
| siRNA 276 | 276 | GGGGGCUCCCGCCCCCGCC | 2327 | GGCGGGGGCGGGAGCCCCC |
| siRNA 277 | 277 | GGGGCUCCCGCCCCCGCCC | 2328 | GGGCGGGGGCGGGAGCCCC |
| siRNA 278 | 278 | GGGCUCCCGCCCCCGCCCA | 2329 | UGGGCGGGGGCGGGAGCCC |
| siRNA 279 | 279 | GGCUCCCGCCCCCGCCCAG | 2330 | CUGGGCGGGGGCGGGAGCC |
| siRNA 280 | 280 | GCUCCCGCCCCCGCCCAGG | 2331 | CCUGGGCGGGGGCGGGAGC |
| siRNA 281 | 281 | CUCCCGCCCCCGCCCAGGG | 2332 | CCCUGGGCGGGGGCGGGAG |
| siRNA 282 | 282 | UCCCGCCCCCGCCCAGGGC | 2333 | GCCCUGGGCGGGGGCGGGA |
| siRNA 283 | 283 | CCCGCCCCCGCCCAGGGCA | 2334 | UGCCCUGGGCGGGGGCGGG |
| siRNA 284 | 284 | CCGCCCCCGCCCAGGGCAG | 2335 | CUGCCCUGGGCGGGGGCGG |
| siRNA 285 | 285 | CGCCCCCGCCCAGGGCAGU | 2336 | ACUGCCCUGGGCGGGGGCG |
| siRNA 286 | 286 | GCCCCCGCCCAGGGCAGUU | 2337 | AACUGCCCUGGGCGGGGGC |
| siRNA 287 | 287 | CCCCCGCCCAGGGCAGUUC | 2338 | GAACUGCCCUGGGCGGGGG |
| siRNA 288 | 288 | CCCCGCCCAGGGCAGUUCC | 2339 | GGAACUGCCCUGGGCGGGG |
| siRNA 289 | 289 | CCCGCCCAGGGCAGUUCCC | 2340 | GGGAACUGCCCUGGGCGGG |
| siRNA 290 | 290 | CCGCCCAGGGCAGUUCCCU | 2341 | AGGGAACUGCCCUGGGCGG |
| siRNA 291 | 291 | CGCCCAGGGCAGUUCCCUC | 2342 | GAGGGAACUGCCCUGGGCG |
| siRNA 292 | 292 | GCCCAGGGCAGUUCCCUCG | 2343 | CGAGGGAACUGCCCUGGGC |
| siRNA 293 | 293 | CCCAGGGCAGUUCCCUCGA | 2344 | UCGAGGGAACUGCCCUGGG |
| siRNA 294 | 294 | CCAGGGCAGUUCCCUCGAG | 2345 | CUCGAGGGAACUGCCCUGG |
| siRNA 295 | 295 | CAGGGCAGUUCCCUCGAGC | 2346 | GCUCGAGGGAACUGCCCUG |
| siRNA 296 | 296 | AGGGCAGUUCCCUCGAGCA | 2347 | UGCUCGAGGGAACUGCCCU |
| siRNA 297 | 297 | GGGCAGUUCCCUCGAGCAG | 2348 | CUGCUCGAGGGAACUGCCC |
| siRNA 298 | 298 | GGCAGUUCCCUCGAGCAGU | 2349 | ACUGCUCGAGGGAACUGCC |
| siRNA 299 | 299 | GCAGUUCCCUCGAGCAGUA | 2350 | UACUGCUCGAGGGAACUGC |
| siRNA 300 | 300 | CAGUUCCCUCGAGCAGUAG | 2351 | CUACUGCUCGAGGGAACUG |
| siRNA 301 | 301 | AGUUCCCUCGAGCAGUAGC | 2352 | GCUACUGCUCGAGGGAACU |
| siRNA 302 | 302 | GUUCCCUCGAGCAGUAGCC | 2353 | GGCUACUGCUCGAGGGAAC |
| siRNA 303 | 303 | UUCCCUCGAGCAGUAGCCC | 2354 | GGGCUACUGCUCGAGGGAA |
| siRNA 304 | 304 | UCCCUCGAGCAGUAGCCCC | 2355 | GGGGCUACUGCUCGAGGGA |
| siRNA 305 | 305 | CCCUCGAGCAGUAGCCCCC | 2356 | GGGGGCUACUGCUCGAGGG |
| siRNA 306 | 306 | CCUCGAGCAGUAGCCCCCA | 2357 | UGGGGGCUACUGCUCGAGG |
| siRNA 307 | 307 | CUCGAGCAGUAGCCCCCAG | 2358 | CUGGGGGCUACUGCUCGAG |
| siRNA 308 | 308 | UCGAGCAGUAGCCCCCAGG | 2359 | CCUGGGGGCUACUGCUCGA |
| siRNA 309 | 309 | CGAGCAGUAGCCCCCAGGC | 2360 | GCCUGGGGGCUACUGCUCG |
| siRNA 310 | 310 | GAGCAGUAGCCCCCAGGCC | 2361 | GGCCUGGGGGCUACUGCUC |
| siRNA 311 | 311 | AGCAGUAGCCCCCAGGCCC | 2362 | GGGCCUGGGGGCUACUGCU |
| siRNA 312 | 312 | GCAGUAGCCCCCAGGCCCA | 2363 | UGGGCCUGGGGGCUACUGC |
| siRNA 313 | 313 | CAGUAGCCCCCAGGCCCAA | 2364 | UUGGGCCUGGGGGCUACUG |
| siRNA 314 | 314 | AGUAGCCCCCAGGCCCAAG | 2365 | CUUGGGCCUGGGGGCUACU |
| siRNA 315 | 315 | GUAGCCCCCAGGCCCAAGC | 2366 | GCUUGGGCCUGGGGGCUAC |
| siRNA 316 | 316 | UAGCCCCCAGGCCCAAGCA | 2367 | UGCUUGGGCCUGGGGGCUA |
| siRNA 317 | 317 | AGCCCCCAGGCCCAAGCAC | 2368 | GUGCUUGGGCCUGGGGGCU |
| siRNA 318 | 318 | GCCCCCAGGCCCAAGCACU | 2369 | AGUGCUUGGGCCUGGGGGC |
| siRNA 319 | 319 | CCCCCAGGCCCAAGCACUC | 2370 | GAGUGCUUGGGCCUGGGGG |
| siRNA 320 | 320 | CCCCAGGCCCAAGCACUCA | 2371 | UGAGUGCUUGGGCCUGGGG |
| siRNA 321 | 321 | CCCAGGCCCAAGCACUCAC | 2372 | GUGAGUGCUUGGGCCUGGG |
| siRNA 322 | 322 | CCAGGCCCAAGCACUCACC | 2373 | GGUGAGUGCUUGGGCCUGG |
| siRNA 323 | 323 | CAGGCCCAAGCACUCACCG | 2374 | CGGUGAGUGCUUGGGCCUG |
| siRNA 324 | 324 | AGGCCCAAGCACUCACCGA | 2375 | UCGGUGAGUGCUUGGGCCU |
| siRNA 325 | 325 | GGCCCAAGCACUCACCGAG | 2376 | CUCGGUGAGUGCUUGGGCC |
| siRNA 326 | 326 | GCCCAAGCACUCACCGAGG | 2377 | CCUCGGUGAGUGCUUGGGC |
| siRNA 327 | 327 | CCCAAGCACUCACCGAGGA | 2378 | UCCUCGGUGAGUGCUUGGG |
| siRNA 328 | 328 | CCAAGCACUCACCGAGGAC | 2379 | GUCCUCGGUGAGUGCUUGG |
| siRNA 329 | 329 | CAAGCACUCACCGAGGACG | 2380 | CGUCCUCGGUGAGUGCUUG |
| siRNA 330 | 330 | AAGCACUCACCGAGGACGG | 2381 | CCGUCCUCGGUGAGUGCUU |
| siRNA 331 | 331 | AGCACUCACCGAGGACGGG | 2382 | CCCGUCCUCGGUGAGUGCU |
| siRNA 332 | 332 | GCACUCACCGAGGACGGGA | 2383 | UCCCGUCCUCGGUGAGUGC |
| siRNA 333 | 333 | CACUCACCGAGGACGGGAG | 2384 | CUCCCGUCCUCGGUGAGUG |
| siRNA 334 | 334 | ACUCACCGAGGACGGGAGG | 2385 | CCUCCCGUCCUCGGUGAGU |
| siRNA 335 | 335 | CUCACCGAGGACGGGAGGC | 2386 | GCCUCCCGUCCUCGGUGAG |
| siRNA 336 | 336 | UCACCGAGGACGGGAGGCC | 2387 | GGCCUCCCGUCCUCGGUGA |
| siRNA 337 | 337 | CACCGAGGACGGGAGGCCC | 2388 | GGGCCUCCCGUCCUCGGUG |
| siRNA 338 | 338 | ACCGAGGACGGGAGGCCCU | 2389 | AGGGCCUCCCGUCCUCGGU |
| siRNA 339 | 339 | CCGAGGACGGGAGGCCCUG | 2390 | CAGGGCCUCCCGUCCUCGG |
| siRNA 340 | 340 | CGAGGACGGGAGGCCCUGC | 2391 | GCAGGGCCUCCCGUCCUCG |
| siRNA 341 | 341 | GAGGACGGGAGGCCCUGCA | 2392 | UGCAGGGCCUCCCGUCCUC |
| siRNA 342 | 342 | AGGACGGGAGGCCCUGCAG | 2393 | CUGCAGGGCCUCCCGUCCU |
| siRNA 343 | 343 | GGACGGGAGGCCCUGCAGG | 2394 | CCUGCAGGGCCUCCCGUCC |
| siRNA 344 | 344 | GACGGGAGGCCCUGCAGGU | 2395 | ACCUGCAGGGCCUCCCGUC |
| siRNA 345 | 345 | ACGGGAGGCCCUGCAGGUU | 2396 | AACCUGCAGGGCCUCCCGU |
| siRNA 346 | 346 | CGGGAGGCCCUGCAGGUUC | 2397 | GAACCUGCAGGGCCUCCCG |
| siRNA 347 | 347 | GGGAGGCCCUGCAGGUUCC | 2398 | GGAACCUGCAGGGCCUCCC |
| siRNA 348 | 348 | GGAGGCCCUGCAGGUUCCC | 2399 | GGGAACCUGCAGGGCCUCC |
| siRNA 349 | 349 | GAGGCCCUGCAGGUUCCCC | 2400 | GGGGAACCUGCAGGGCCUC |
| siRNA 350 | 350 | AGGCCCUGCAGGUUCCCCU | 2401 | AGGGGAACCUGCAGGGCCU |
| siRNA 351 | 351 | GGCCCUGCAGGUUCCCCUU | 2402 | AAGGGGAACCUGCAGGGCC |
| siRNA 352 | 352 | GCCCUGCAGGUUCCCCUUC | 2403 | GAAGGGGAACCUGCAGGGC |
| siRNA 353 | 353 | CCCUGCAGGUUCCCCUUCC | 2404 | GGAAGGGGAACCUGCAGGG |
| siRNA 354 | 354 | CCUGCAGGUUCCCCUUCCG | 2405 | CGGAAGGGGAACCUGCAGG |
| siRNA 355 | 355 | CUGCAGGUUCCCCUUCCGC | 2406 | GCGGAAGGGGAACCUGCAG |
| siRNA 356 | 356 | UGCAGGUUCCCCUUCCGCU | 2407 | AGCGGAAGGGGAACCUGCA |
| siRNA 357 | 357 | GCAGGUUCCCCUUCCGCUA | 2408 | UAGCGGAAGGGGAACCUGC |
| siRNA 358 | 358 | CAGGUUCCCCUUCCGCUAC | 2409 | GUAGCGGAAGGGGAACCUG |
| siRNA 359 | 359 | AGGUUCCCCUUCCGCUACG | 2410 | CGUAGCGGAAGGGGAACCU |
| siRNA 360 | 360 | GGUUCCCCUUCCGCUACGG | 2411 | CCGUAGCGGAAGGGGAACC |
| siRNA 361 | 361 | GUUCCCCUUCCGCUACGGG | 2412 | CCCGUAGCGGAAGGGGAAC |
| siRNA 362 | 362 | UUCCCCUUCCGCUACGGGG | 2413 | CCCCGUAGCGGAAGGGGAA |
| siRNA 363 | 363 | UCCCCUUCCGCUACGGGGG | 2414 | CCCCCGUAGCGGAAGGGGA |
| siRNA 364 | 364 | CCCCUUCCGCUACGGGGGC | 2415 | GCCCCCGUAGCGGAAGGGG |
| siRNA 365 | 365 | CCCUUCCGCUACGGGGGCC | 2416 | GGCCCCCGUAGCGGAAGGG |
| siRNA 366 | 366 | CCUUCCGCUACGGGGGCCG | 2417 | CGGCCCCCGUAGCGGAAGG |
| siRNA 367 | 367 | CUUCCGCUACGGGGGCCGC | 2418 | GCGGCCCCCGUAGCGGAAG |
| siRNA 368 | 368 | UUCCGCUACGGGGGCCGCA | 2419 | UGCGGCCCCCGUAGCGGAA |
| siRNA 369 | 369 | UCCGCUACGGGGGCCGCAU | 2420 | AUGCGGCCCCCGUAGCGGA |
| siRNA 370 | 370 | CCGCUACGGGGGCCGCAUG | 2421 | CAUGCGGCCCCCGUAGCGG |
| siRNA 371 | 371 | CGCUACGGGGGCCGCAUGC | 2422 | GCAUGCGGCCCCCGUAGCG |
| siRNA 372 | 372 | GCUACGGGGGCCGCAUGCU | 2423 | AGCAUGCGGCCCCCGUAGC |
| siRNA 373 | 373 | CUACGGGGGCCGCAUGCUG | 2424 | CAGCAUGCGGCCCCCGUAG |
| siRNA 374 | 374 | UACGGGGGCCGCAUGCUGC | 2425 | GCAGCAUGCGGCCCCCGUA |
| siRNA 375 | 375 | ACGGGGGCCGCAUGCUGCA | 2426 | UGCAGCAUGCGGCCCCCGU |
| siRNA 376 | 376 | CGGGGGCCGCAUGCUGCAU | 2427 | AUGCAGCAUGCGGCCCCCG |
| siRNA 377 | 377 | GGGGGCCGCAUGCUGCAUG | 2428 | CAUGCAGCAUGCGGCCCCC |
| siRNA 378 | 378 | GGGGCCGCAUGCUGCAUGC | 2429 | GCAUGCAGCAUGCGGCCCC |
| siRNA 379 | 379 | GGGCCGCAUGCUGCAUGCC | 2430 | GGCAUGCAGCAUGCGGCCC |
| siRNA 380 | 380 | GGCCGCAUGCUGCAUGCCU | 2431 | AGGCAUGCAGCAUGCGGCC |
| siRNA 381 | 381 | GCCGCAUGCUGCAUGCCUG | 2432 | CAGGCAUGCAGCAUGCGGC |
| siRNA 382 | 382 | CCGCAUGCUGCAUGCCUGC | 2433 | GCAGGCAUGCAGCAUGCGG |
| siRNA 383 | 383 | CGCAUGCUGCAUGCCUGCA | 2434 | UGCAGGCAUGCAGCAUGCG |
| siRNA 384 | 384 | GCAUGCUGCAUGCCUGCAC | 2435 | GUGCAGGCAUGCAGCAUGC |
| siRNA 385 | 385 | CAUGCUGCAUGCCUGCACU | 2436 | AGUGCAGGCAUGCAGCAUG |
| siRNA 386 | 386 | AUGCUGCAUGCCUGCACUU | 2437 | AAGUGCAGGCAUGCAGCAU |
| siRNA 387 | 387 | UGCUGCAUGCCUGCACUUC | 2438 | GAAGUGCAGGCAUGCAGCA |
| siRNA 388 | 388 | GCUGCAUGCCUGCACUUCG | 2439 | CGAAGUGCAGGCAUGCAGC |
| siRNA 389 | 389 | CUGCAUGCCUGCACUUCGG | 2440 | CCGAAGUGCAGGCAUGCAG |
| siRNA 390 | 390 | UGCAUGCCUGCACUUCGGA | 2441 | UCCGAAGUGCAGGCAUGCA |
| siRNA 391 | 391 | GCAUGCCUGCACUUCGGAG | 2442 | CUCCGAAGUGCAGGCAUGC |
| siRNA 392 | 392 | CAUGCCUGCACUUCGGAGG | 2443 | CCUCCGAAGUGCAGGCAUG |
| siRNA 393 | 393 | AUGCCUGCACUUCGGAGGG | 2444 | CCCUCCGAAGUGCAGGCAU |
| siRNA 394 | 394 | UGCCUGCACUUCGGAGGGC | 2445 | GCCCUCCGAAGUGCAGGCA |
| siRNA 395 | 395 | GCCUGCACUUCGGAGGGCA | 2446 | UGCCCUCCGAAGUGCAGGC |
| siRNA 396 | 396 | CCUGCACUUCGGAGGGCAG | 2447 | CUGCCCUCCGAAGUGCAGG |
| siRNA 397 | 397 | CUGCACUUCGGAGGGCAGU | 2448 | ACUGCCCUCCGAAGUGCAG |
| siRNA 398 | 398 | UGCACUUCGGAGGGCAGUG | 2449 | CACUGCCCUCCGAAGUGCA |
| siRNA 399 | 399 | GCACUUCGGAGGGCAGUGC | 2450 | GCACUGCCCUCCGAAGUGC |
| siRNA 400 | 400 | CACUUCGGAGGGCAGUGCA | 2451 | UGCACUGCCCUCCGAAGUG |
| siRNA 401 | 401 | ACUUCGGAGGGCAGUGCAC | 2452 | GUGCACUGCCCUCCGAAGU |
| siRNA 402 | 402 | CUUCGGAGGGCAGUGCACA | 2453 | UGUGCACUGCCCUCCGAAG |
| siRNA 403 | 403 | UUCGGAGGGCAGUGCACAC | 2454 | GUGUGCACUGCCCUCCGAA |
| siRNA 404 | 404 | UCGGAGGGCAGUGCACACA | 2455 | UGUGUGCACUGCCCUCCGA |
| siRNA 405 | 405 | CGGAGGGCAGUGCACACAG | 2456 | CUGUGUGCACUGCCCUCCG |
| siRNA 406 | 406 | GGAGGGCAGUGCACACAGG | 2457 | CCUGUGUGCACUGCCCUCC |
| siRNA 407 | 407 | GAGGGCAGUGCACACAGGA | 2458 | UCCUGUGUGCACUGCCCUC |
| siRNA 408 | 408 | AGGGCAGUGCACACAGGAA | 2459 | UUCCUGUGUGCACUGCCCU |
| siRNA 409 | 409 | GGGCAGUGCACACAGGAAG | 2460 | CUUCCUGUGUGCACUGCCC |
| siRNA 410 | 410 | GGCAGUGCACACAGGAAGU | 2461 | ACUUCCUGUGUGCACUGCC |
| siRNA 411 | 411 | GCAGUGCACACAGGAAGUG | 2462 | CACUUCCUGUGUGCACUGC |
| siRNA 412 | 412 | CAGUGCACACAGGAAGUGG | 2463 | CCACUUCCUGUGUGCACUG |
| siRNA 413 | 413 | AGUGCACACAGGAAGUGGU | 2464 | ACCACUUCCUGUGUGCACU |
| siRNA 414 | 414 | GUGCACACAGGAAGUGGUG | 2465 | CACCACUUCCUGUGUGCAC |
| siRNA 415 | 415 | UGCACACAGGAAGUGGUGU | 2466 | ACACCACUUCCUGUGUGCA |
| siRNA 416 | 416 | GCACACAGGAAGUGGUGUG | 2467 | CACACCACUUCCUGUGUGC |
| siRNA 417 | 417 | CACACAGGAAGUGGUGUGC | 2468 | GCACACCACUUCCUGUGUG |
| siRNA 418 | 418 | ACACAGGAAGUGGUGUGCC | 2469 | GGCACACCACUUCCUGUGU |
| siRNA 419 | 419 | CACAGGAAGUGGUGUGCCA | 2470 | UGGCACACCACUUCCUGUG |
| siRNA 420 | 420 | ACAGGAAGUGGUGUGCCAC | 2471 | GUGGCACACCACUUCCUGU |
| siRNA 421 | 421 | CAGGAAGUGGUGUGCCACA | 2472 | UGUGGCACACCACUUCCUG |
| siRNA 422 | 422 | AGGAAGUGGUGUGCCACAA | 2473 | UUGUGGCACACCACUUCCU |
| siRNA 423 | 423 | GGAAGUGGUGUGCCACAAC | 2474 | GUUGUGGCACACCACUUCC |
| siRNA 424 | 424 | GAAGUGGUGUGCCACAACU | 2475 | AGUUGUGGCACACCACUUC |
| siRNA 425 | 425 | AAGUGGUGUGCCACAACUC | 2476 | GAGUUGUGGCACACCACUU |
| siRNA 426 | 426 | AGUGGUGUGCCACAACUCA | 2477 | UGAGUUGUGGCACACCACU |
| siRNA 427 | 427 | GUGGUGUGCCACAACUCAC | 2478 | GUGAGUUGUGGCACACCAC |
| siRNA 428 | 428 | UGGUGUGCCACAACUCACA | 2479 | UGUGAGUUGUGGCACACCA |
| siRNA 429 | 429 | GGUGUGCCACAACUCACAA | 2480 | UUGUGAGUUGUGGCACACC |
| siRNA 430 | 430 | GUGUGCCACAACUCACAAC | 2481 | GUUGUGAGUUGUGGCACAC |
| siRNA 431 | 431 | UGUGCCACAACUCACAACU | 2482 | AGUUGUGAGUUGUGGCACA |
| siRNA 432 | 432 | GUGCCACAACUCACAACUA | 2483 | UAGUUGUGAGUUGUGGCAC |
| siRNA 433 | 433 | UGCCACAACUCACAACUAC | 2484 | GUAGUUGUGAGUUGUGGCA |
| siRNA 434 | 434 | GCCACAACUCACAACUACG | 2485 | CGUAGUUGUGAGUUGUGGC |
| siRNA 435 | 435 | CCACAACUCACAACUACGA | 2486 | UCGUAGUUGUGAGUUGUGG |
| siRNA 436 | 436 | CACAACUCACAACUACGAC | 2487 | GUCGUAGUUGUGAGUUGUG |
| siRNA 437 | 437 | ACAACUCACAACUACGACC | 2488 | GGUCGUAGUUGUGAGUUGU |
| siRNA 438 | 438 | CAACUCACAACUACGACCG | 2489 | CGGUCGUAGUUGUGAGUUG |
| siRNA 439 | 439 | AACUCACAACUACGACCGG | 2490 | CCGGUCGUAGUUGUGAGUU |
| siRNA 440 | 440 | ACUCACAACUACGACCGGG | 2491 | CCCGGUCGUAGUUGUGAGU |
| siRNA 441 | 441 | CUCACAACUACGACCGGGA | 2492 | UCCCGGUCGUAGUUGUGAG |
| siRNA 442 | 442 | UCACAACUACGACCGGGAC | 2493 | GUCCCGGUCGUAGUUGUGA |
| siRNA 443 | 443 | CACAACUACGACCGGGACA | 2494 | UGUCCCGGUCGUAGUUGUG |
| siRNA 444 | 444 | ACAACUACGACCGGGACAG | 2495 | CUGUCCCGGUCGUAGUUGU |
| siRNA 445 | 445 | CAACUACGACCGGGACAGG | 2496 | CCUGUCCCGGUCGUAGUUG |
| siRNA 446 | 446 | AACUACGACCGGGACAGGG | 2497 | CCCUGUCCCGGUCGUAGUU |
| siRNA 447 | 447 | ACUACGACCGGGACAGGGC | 2498 | GCCCUGUCCCGGUCGUAGU |
| siRNA 448 | 448 | CUACGACCGGGACAGGGCC | 2499 | GGCCCUGUCCCGGUCGUAG |
| siRNA 449 | 449 | UACGACCGGGACAGGGCCU | 2500 | AGGCCCUGUCCCGGUCGUA |
| siRNA 450 | 450 | ACGACCGGGACAGGGCCUG | 2501 | CAGGCCCUGUCCCGGUCGU |
| siRNA 451 | 451 | CGACCGGGACAGGGCCUGG | 2502 | CCAGGCCCUGUCCCGGUCG |
| siRNA 452 | 452 | GACCGGGACAGGGCCUGGG | 2503 | CCCAGGCCCUGUCCCGGUC |
| siRNA 453 | 453 | ACCGGGACAGGGCCUGGGG | 2504 | CCCCAGGCCCUGUCCCGGU |
| siRNA 454 | 454 | CCGGGACAGGGCCUGGGGC | 2505 | GCCCCAGGCCCUGUCCCGG |
| siRNA 455 | 455 | CGGGACAGGGCCUGGGGCU | 2506 | AGCCCCAGGCCCUGUCCCG |
| siRNA 456 | 456 | GGGACAGGGCCUGGGGCUA | 2507 | UAGCCCCAGGCCCUGUCCC |
| siRNA 457 | 457 | GGACAGGGCCUGGGGCUAC | 2508 | GUAGCCCCAGGCCCUGUCC |
| siRNA 458 | 458 | GACAGGGCCUGGGGCUACU | 2509 | AGUAGCCCCAGGCCCUGUC |
| siRNA 459 | 459 | ACAGGGCCUGGGGCUACUG | 2510 | CAGUAGCCCCAGGCCCUGU |
| siRNA 460 | 460 | CAGGGCCUGGGGCUACUGU | 2511 | ACAGUAGCCCCAGGCCCUG |
| siRNA 461 | 461 | AGGGCCUGGGGCUACUGUG | 2512 | CACAGUAGCCCCAGGCCCU |
| siRNA 462 | 462 | GGGCCUGGGGCUACUGUGU | 2513 | ACACAGUAGCCCCAGGCCC |
| siRNA 463 | 463 | GGCCUGGGGCUACUGUGUG | 2514 | CACACAGUAGCCCCAGGCC |
| siRNA 464 | 464 | GCCUGGGGCUACUGUGUGG | 2515 | CCACACAGUAGCCCCAGGC |
| siRNA 465 | 465 | CCUGGGGCUACUGUGUGGA | 2516 | UCCACACAGUAGCCCCAGG |
| siRNA 466 | 466 | CUGGGGCUACUGUGUGGAG | 2517 | CUCCACACAGUAGCCCCAG |
| siRNA 467 | 467 | UGGGGCUACUGUGUGGAGG | 2518 | CCUCCACACAGUAGCCCCA |
| siRNA 468 | 468 | GGGGCUACUGUGUGGAGGC | 2519 | GCCUCCACACAGUAGCCCC |
| siRNA 469 | 469 | GGGCUACUGUGUGGAGGCC | 2520 | GGCCUCCACACAGUAGCCC |
| siRNA 470 | 470 | GGCUACUGUGUGGAGGCCA | 2521 | UGGCCUCCACACAGUAGCC |
| siRNA 471 | 471 | GCUACUGUGUGGAGGCCAC | 2522 | GUGGCCUCCACACAGUAGC |
| siRNA 472 | 472 | CUACUGUGUGGAGGCCACC | 2523 | GGUGGCCUCCACACAGUAG |
| siRNA 473 | 473 | UACUGUGUGGAGGCCACCC | 2524 | GGGUGGCCUCCACACAGUA |
| siRNA 474 | 474 | ACUGUGUGGAGGCCACCCC | 2525 | GGGGUGGCCUCCACACAGU |
| siRNA 475 | 475 | CUGUGUGGAGGCCACCCCG | 2526 | CGGGGUGGCCUCCACACAG |
| siRNA 476 | 476 | UGUGUGGAGGCCACCCCGC | 2527 | GCGGGGUGGCCUCCACACA |
| siRNA 477 | 477 | GUGUGGAGGCCACCCCGCC | 2528 | GGCGGGGUGGCCUCCACAC |
| siRNA 478 | 478 | UGUGGAGGCCACCCCGCCU | 2529 | AGGCGGGGUGGCCUCCACA |
| siRNA 479 | 479 | GUGGAGGCCACCCCGCCUC | 2530 | GAGGCGGGGUGGCCUCCAC |
| siRNA 480 | 480 | UGGAGGCCACCCCGCCUCC | 2531 | GGAGGCGGGGUGGCCUCCA |
| siRNA 481 | 481 | GGAGGCCACCCCGCCUCCA | 2532 | UGGAGGCGGGGUGGCCUCC |
| siRNA 482 | 482 | GAGGCCACCCCGCCUCCAG | 2533 | CUGGAGGCGGGGUGGCCUC |
| siRNA 483 | 483 | AGGCCACCCCGCCUCCAGG | 2534 | CCUGGAGGCGGGGUGGCCU |
| siRNA 484 | 484 | GGCCACCCCGCCUCCAGGG | 2535 | CCCUGGAGGCGGGGUGGCC |
| siRNA 485 | 485 | GCCACCCCGCCUCCAGGGG | 2536 | CCCCUGGAGGCGGGGUGGC |
| siRNA 486 | 486 | CCACCCCGCCUCCAGGGGG | 2537 | CCCCCUGGAGGGCGGGUGG |
| siRNA 487 | 487 | CACCCCGCCUCCAGGGGGC | 2538 | GCCCCCUGGAGGGCGGGUG |
| siRNA 488 | 488 | ACCCCGCCUCCAGGGGGCC | 2539 | GGCCCCCUGGAGGCGGGGU |
| siRNA 489 | 489 | CCCCGCCUCCAGGGGGCCC | 2540 | GGGCCCCCUGGAGGCGGGG |
| siRNA 490 | 490 | CCCGCCUCCAGGGGGCCCA | 2541 | UGGGCCCCCUGGAGGCGGG |
| siRNA 491 | 491 | CCGCCUCCAGGGGGCCCAG | 2542 | CUGGGCCCCCUGGAGGCGG |
| siRNA 492 | 492 | CGCCUCCAGGGGGCCCAGC | 2543 | GCUGGGCCCCCUGGAGGCG |
| siRNA 493 | 493 | GCCUCCAGGGGGCCCAGCU | 2544 | AGCUGGGCCCCCUGGAGGC |
| siRNA 494 | 494 | CCUCCAGGGGGCCCAGCUG | 2545 | CAGCUGGGCCCCCUGGAGG |
| siRNA 495 | 495 | CUCCAGGGGGCCCAGCUGC | 2546 | GCAGCUGGGCCCCCUGGAG |
| siRNA 496 | 496 | UCCAGGGGGCCCAGCUGCC | 2547 | GGCAGCUGGGCCCCCUGGA |
| siRNA 497 | 497 | CCAGGGGGCCCAGCUGCCC | 2548 | GGGCAGCUGGGCCCCCUGG |
| siRNA 498 | 498 | CAGGGGGCCCAGCUGCCCU | 2549 | AGGGCAGCUGGGCCCCCUG |
| siRNA 499 | 499 | AGGGGGCCCAGCUGCCCUG | 2550 | CAGGGCAGCUGGGCCCCCU |
| siRNA 500 | 500 | GGGGGCCCAGCUGCCCUGG | 2551 | CCAGGGCAGCUGGGCCCCC |
| siRNA 501 | 501 | GGGGCCCAGCUGCCCUGGA | 2552 | UCCAGGGCAGCUGGGCCCC |
| siRNA 502 | 502 | GGGCCCAGCUGCCCUGGAU | 2553 | AUCCAGGGCAGCUGGGCCC |
| siRNA 503 | 503 | GGCCCAGCUGCCCUGGAUC | 2554 | GAUCCAGGGCAGCUGGGCC |
| siRNA 504 | 504 | GCCCAGCUGCCCUGGAUCC | 2555 | GGAUCCAGGGCAGCUGGGC |
| siRNA 505 | 505 | CCCAGCUGCCCUGGAUCCC | 2556 | GGGAUCCAGGGCAGCUGGG |
| siRNA 506 | 506 | CCAGCUGCCCUGGAUCCCU | 2557 | AGGGAUCCAGGGCAGCUGG |
| siRNA 507 | 507 | CAGCUGCCCUGGAUCCCUG | 2558 | CAGGGAUCCAGGGCAGCUG |
| siRNA 508 | 508 | AGCUGCCCUGGAUCCCUGU | 2559 | ACAGGGAUCCAGGGCAGCU |
| siRNA 509 | 509 | GCUGCCCUGGAUCCCUGUG | 2560 | CACAGGGAUCCAGGGCAGC |
| siRNA 510 | 510 | CUGCCCUGGAUCCCUGUGC | 2561 | GCACAGGGAUCCAGGGCAG |
| siRNA 511 | 511 | UGCCCUGGAUCCCUGUGCC | 2562 | GGCACAGGGAUCCAGGGCA |
| siRNA 512 | 512 | GCCCUGGAUCCCUGUGCCU | 2563 | AGGCACAGGGAUCCAGGGC |
| siRNA 513 | 513 | CCCUGGAUCCCUGUGCCUC | 2564 | GAGGCACAGGGAUCCAGGG |
| siRNA 514 | 514 | CCUGGAUCCCUGUGCCUCC | 2565 | GGAGGCACAGGGAUCCAGG |
| siRNA 515 | 515 | CUGGAUCCCUGUGCCUCCG | 2566 | CGGAGGCACAGGGAUCCAG |
| siRNA 516 | 516 | UGGAUCCCUGUGCCUCCGG | 2567 | CCGGAGGCACAGGGAUCCA |
| siRNA 517 | 517 | GGAUCCCUGUGCCUCCGGC | 2568 | GCCGGAGGCACAGGGAUCC |
| siRNA 518 | 518 | GAUCCCUGUGCCUCCGGCC | 2569 | GGCCGGAGGCACAGGGAUC |
| siRNA 519 | 519 | AUCCCUGUGCCUCCGGCCC | 2570 | GGGCCGGAGGCACAGGGAU |
| siRNA 520 | 520 | UCCCUGUGCCUCCGGCCCC | 2571 | GGGGCCGGAGGCACAGGGA |
| siRNA 521 | 521 | CCCUGUGCCUCCGGCCCCU | 2572 | AGGGGCCGGAGGCACAGGG |
| siRNA 522 | 522 | CCUGUGCCUCCGGCCCCUG | 2573 | CAGGGGCCGGAGGCACAGG |
| siRNA 523 | 523 | CUGUGCCUCCGGCCCCUGC | 2574 | GCAGGGGCCGGAGGCACAG |
| siRNA 524 | 524 | UGUGCCUCCGGCCCCUGCC | 2575 | GGCAGGGGCCGGAGGCACA |
| siRNA 525 | 525 | GUGCCUCCGGCCCCUGCCU | 2576 | AGGCAGGGGCCGGAGGCAC |
| siRNA 526 | 526 | UGCCUCCGGCCCCUGCCUC | 2577 | GAGGCAGGGGCCGGAGGCA |
| siRNA 527 | 527 | GCCUCCGGCCCCUGCCUCA | 2578 | UGAGGCAGGGGCCGGAGGC |
| siRNA 528 | 528 | CCUCCGGCCCCUGCCUCAA | 2579 | UUGAGGCAGGGGCCGGAGG |
| siRNA 529 | 529 | CUCCGGCCCCUGCCUCAAU | 2580 | AUUGAGGCAGGGGCCGGAG |
| siRNA 530 | 530 | UCCGGCCCCUGCCUCAAUG | 2581 | CAUUGAGGCAGGGGCCGGA |
| siRNA 531 | 531 | CCGGCCCCUGCCUCAAUGG | 2582 | CCAUUGAGGCAGGGGCCGG |
| siRNA 532 | 532 | CGGCCCCUGCCUCAAUGGA | 2583 | UCCAUUGAGGCAGGGGCCG |
| siRNA 533 | 533 | GGCCCCUGCCUCAAUGGAG | 2584 | CUCCAUUGAGGCAGGGGCC |
| siRNA 534 | 534 | GCCCCUGCCUCAAUGGAGG | 2585 | CCUCCAUUGAGGCAGGGGC |
| siRNA 535 | 535 | CCCCUGCCUCAAUGGAGGC | 2586 | GCCUCCAUUGAGGCAGGGG |
| siRNA 536 | 536 | CCCUGCCUCAAUGGAGGCU | 2587 | AGCCUCCAUUGAGGCAGGG |
| siRNA 537 | 537 | CCUGCCUCAAUGGAGGCUC | 2588 | GAGCCUCCAUUGAGGCAGG |
| siRNA 538 | 538 | CUGCCUCAAUGGAGGCUCC | 2589 | GGAGCCUCCAUUGAGGCAG |
| siRNA 539 | 539 | UGCCUCAAUGGAGGCUCCU | 2590 | AGGAGCCUCCAUUGAGGCA |
| siRNA 540 | 540 | GCCUCAAUGGAGGCUCCUG | 2591 | CAGGAGCCUCCAUUGAGGC |
| siRNA 541 | 541 | CCUCAAUGGAGGCUCCUGC | 2592 | GCAGGAGCCUCCAUUGAGG |
| siRNA 542 | 542 | CUCAAUGGAGGCUCCUGCU | 2593 | AGCAGGAGCCUCCAUUGAG |
| siRNA 543 | 543 | UCAAUGGAGGCUCCUGCUC | 2594 | GAGCAGGAGCCUCCAUUGA |
| siRNA 544 | 544 | CAAUGGAGGCUCCUGCUCC | 2595 | GGAGCAGGAGCCUCCAUUG |
| siRNA 545 | 545 | AAUGGAGGCUCCUGCUCCA | 2596 | UGGAGCAGGAGCCUCCAUU |
| siRNA 546 | 546 | AUGGAGGCUCCUGCUCCAA | 2597 | UUGGAGCAGGAGCCUCCAU |
| siRNA 547 | 547 | UGGAGGCUCCUGCUCCAAU | 2598 | AUUGGAGCAGGAGCCUCCA |
| siRNA 548 | 548 | GGAGGCUCCUGCUCCAAUA | 2599 | UAUUGGAGCAGGAGCCUCC |
| siRNA 549 | 549 | GAGGCUCCUGCUCCAAUAC | 2600 | GUAUUGGAGCAGGAGCCUC |
| siRNA 550 | 550 | AGGCUCCUGCUCCAAUACC | 2601 | GGUAUUGGAGCAGGAGCCU |
| siRNA 551 | 551 | GGCUCCUGCUCCAAUACCC | 2602 | GGGUAUUGGAGCAGGAGCC |
| siRNA 552 | 552 | GCUCCUGCUCCAAUACCCA | 2603 | UGGGUAUUGGAGCAGGAGC |
| siRNA 553 | 553 | CUCCUGCUCCAAUACCCAG | 2604 | CUGGGUAUUGGAGCAGGAG |
| siRNA 554 | 554 | UCCUGCUCCAAUACCCAGG | 2605 | CCUGGGUAUUGGAGCAGGA |
| siRNA 555 | 555 | CCUGCUCCAAUACCCAGGA | 2606 | UCCUGGGUAUUGGAGCAGG |
| siRNA 556 | 556 | CUGCUCCAAUACCCAGGAC | 2607 | GUCCUGGGUAUUGGAGCAG |
| siRNA 557 | 557 | UGCUCCAAUACCCAGGACC | 2608 | GGUCCUGGGUAUUGGAGCA |
| siRNA 558 | 558 | GCUCCAAUACCCAGGACCC | 2609 | GGGUCCUGGGUAUUGGAGC |
| siRNA 559 | 559 | CUCCAAUACCCAGGACCCC | 2610 | GGGGUCCUGGGUAUUGGAG |
| siRNA 560 | 560 | UCCAAUACCCAGGACCCCC | 2611 | GGGGGUCCUGGGUAUUGGA |
| siRNA 561 | 561 | CCAAUACCCAGGACCCCCA | 2612 | UGGGGGUCCUGGGUAUUGG |
| siRNA 562 | 562 | CAAUACCCAGGACCCCCAG | 2613 | CUGGGGGUCCUGGGUAUUG |
| siRNA 563 | 563 | AAUACCCAGGACCCCCAGU | 2614 | ACUGGGGGUCCUGGGUAUU |
| siRNA 564 | 564 | AUACCCAGGACCCCCAGUC | 2615 | GACUGGGGGUCCUGGGUAU |
| siRNA 565 | 565 | UACCCAGGACCCCCAGUCC | 2616 | GGACUGGGGGUCCUGGGUA |
| siRNA 566 | 566 | ACCCAGGACCCCCAGUCCU | 2617 | AGGACUGGGGGUCCUGGGU |
| siRNA 567 | 567 | CCCAGGACCCCCAGUCCUA | 2618 | UAGGACUGGGGGUCCUGGG |
| siRNA 568 | 568 | CCAGGACCCCCAGUCCUAU | 2619 | AUAGGACUGGGGGUCCUGG |
| siRNA 569 | 569 | CAGGACCCCCAGUCCUAUC | 2620 | GAUAGGACUGGGGGUCCUG |
| siRNA 570 | 570 | AGGACCCCCAGUCCUAUCA | 2621 | UGAUAGGACUGGGGGUCCU |
| siRNA 571 | 571 | GGACCCCCAGUCCUAUCAC | 2622 | GUGAUAGGACUGGGGGUCC |
| siRNA 572 | 572 | GACCCCCAGUCCUAUCACU | 2623 | AGUGAUAGGACUGGGGGUC |
| siRNA 573 | 573 | ACCCCCAGUCCUAUCACUG | 2624 | CAGUGAUAGGACUGGGGGU |
| siRNA 574 | 574 | CCCCCAGUCCUAUCACUGC | 2625 | GCAGUGAUAGGACUGGGGG |
| siRNA 575 | 575 | CCCCAGUCCUAUCACUGCA | 2626 | UGCAGUGAUAGGACUGGGG |
| siRNA 576 | 576 | CCCAGUCCUAUCACUGCAG | 2627 | CUGCAGUGAUAGGACUGGG |
| siRNA 577 | 577 | CCAGUCCUAUCACUGCAGC | 2628 | GCUGCAGUGAUAGGACUGG |
| siRNA 578 | 578 | CAGUCCUAUCACUGCAGCU | 2629 | AGCUGCAGUGAUAGGACUG |
| siRNA 579 | 579 | AGUCCUAUCACUGCAGCUG | 2630 | CAGCUGCAGUGAUAGGACU |
| siRNA 580 | 580 | GUCCUAUCACUGCAGCUGC | 2631 | GCAGCUGCAGUGAUAGGAC |
| siRNA 581 | 581 | UCCUAUCACUGCAGCUGCC | 2632 | GGCAGCUGCAGUGAUAGGA |
| siRNA 582 | 582 | CCUAUCACUGCAGCUGCCC | 2633 | GGGCAGCUGCAGUGAUAGG |
| siRNA 583 | 583 | CUAUCACUGCAGCUGCCCC | 2634 | GGGGCAGCUGCAGUGAUAG |
| siRNA 584 | 584 | UAUCACUGCAGCUGCCCCC | 2635 | GGGGGCAGCUGCAGUGAUA |
| siRNA 585 | 585 | AUCACUGCAGCUGCCCCCG | 2636 | CGGGGGCAGCUGCAGUGAU |
| siRNA 586 | 586 | UCACUGCAGCUGCCCCCGG | 2637 | CCGGGGGCAGCUGCAGUGA |
| siRNA 587 | 587 | CACUGCAGCUGCCCCCGGG | 2638 | CCCGGGGGCAGCUGCAGUG |
| siRNA 588 | 588 | ACUGCAGCUGCCCCCGGGC | 2639 | GCCCGGGGGCAGCUGCAGU |
| siRNA 589 | 589 | CUGCAGCUGCCCCCGGGCC | 2640 | GGCCCGGGGGCAGCUGCAG |
| siRNA 590 | 590 | UGCAGCUGCCCCCGGGCCU | 2641 | AGGCCCGGGGGCAGCUGCA |
| siRNA 591 | 591 | GCAGCUGCCCCCGGGCCUU | 2642 | AAGGCCCGGGGGCAGCUGC |
| siRNA 592 | 592 | CAGCUGCCCCCGGGCCUUC | 2643 | GAAGGCCCGGGGGCAGCUG |
| siRNA 593 | 593 | AGCUGCCCCCGGGCCUUCA | 2644 | UGAAGGCCCGGGGGCAGCU |
| siRNA 594 | 594 | GCUGCCCCCGGGCCUUCAC | 2645 | GUGAAGGCCCGGGGGCAGC |
| siRNA 595 | 595 | CUGCCCCCGGGCCUUCACC | 2646 | GGUGAAGGCCCGGGGGCAG |
| siRNA 596 | 596 | UGCCCCCGGGCCUUCACCG | 2647 | CGGUGAAGGCCCGGGGGCA |
| siRNA 597 | 597 | GCCCCCGGGCCUUCACCGG | 2648 | CCGGUGAAGGCCCGGGGGC |
| siRNA 598 | 598 | CCCCCGGGCCUUCACCGGC | 2649 | GCCGGUGAAGGCCCGGGGG |
| siRNA 599 | 599 | CCCCGGGCCUUCACCGGCA | 2650 | UGCCGGUGAAGGCCCGGGG |
| siRNA 600 | 600 | CCCGGGCCUUCACCGGCAA | 2651 | UUGCCGGUGAAGGCCCGGG |
| siRNA 601 | 601 | CCGGGCCUUCACCGGCAAG | 2652 | CUUGCCGGUGAAGGCCCGG |
| siRNA 602 | 602 | CGGGCCUUCACCGGCAAGG | 2653 | CCUUGCCGGUGAAGGCCCG |
| siRNA 603 | 603 | GGGCCUUCACCGGCAAGGA | 2654 | UCCUUGCCGGUGAAGGCCC |
| siRNA 604 | 604 | GGCCUUCACCGGCAAGGAC | 2655 | GUCCUUGCCGGUGAAGGCC |
| siRNA 605 | 605 | GCCUUCACCGGCAAGGACU | 2656 | AGUCCUUGCCGGUGAAGGC |
| siRNA 606 | 606 | CCUUCACCGGCAAGGACUG | 2657 | CAGUCCUUGCCGGUGAAGG |
| siRNA 607 | 607 | CUUCACCGGCAAGGACUGC | 2658 | GCAGUCCUUGCCGGUGAAG |
| siRNA 608 | 608 | UUCACCGGCAAGGACUGCG | 2659 | CGCAGUCCUUGCCGGUGAA |
| siRNA 609 | 609 | UCACCGGCAAGGACUGCGG | 2660 | CCGCAGUCCUUGCCGGUGA |
| siRNA 610 | 610 | CACCGGCAAGGACUGCGGC | 2661 | GCCGCAGUCCUUGCCGGUG |
| siRNA 611 | 611 | ACCGGCAAGGACUGCGGCA | 2662 | UGCCGCAGUCCUUGCCGGU |
| siRNA 612 | 612 | CCGGCAAGGACUGCGGCAC | 2663 | GUGCCGCAGUCCUUGCCGG |
| siRNA 613 | 613 | CGGCAAGGACUGCGGCACA | 2664 | UGUGCCGCAGUCCUUGCCG |
| siRNA 614 | 614 | GGCAAGGACUGCGGCACAG | 2665 | CUGUGCCGCAGUCCUUGCC |
| siRNA 615 | 615 | GCAAGGACUGCGGCACAGA | 2666 | UCUGUGCCGCAGUCCUUGC |
| siRNA 616 | 616 | CAAGGACUGCGGCACAGAG | 2667 | CUCUGUGCCGCAGUCCUUG |
| siRNA 617 | 617 | AAGGACUGCGGCACAGAGA | 2668 | UCUCUGUGCCGCAGUCCUU |
| siRNA 618 | 618 | AGGACUGCGGCACAGAGAA | 2669 | UUCUCUGUGCCGCAGUCCU |
| siRNA 619 | 619 | GGACUGCGGCACAGAGAAA | 2670 | UUUCUCUGUGCCGCAGUCC |
| siRNA 620 | 620 | GACUGCGGCACAGAGAAAU | 2671 | AUUUCUCUGUGCCGCAGUC |
| siRNA 621 | 621 | ACUGCGGCACAGAGAAAUG | 2672 | CAUUUCUCUGUGCCGCAGU |
| siRNA 622 | 622 | CUGCGGCACAGAGAAAUGC | 2673 | GCAUUUCUCUGUGCCGCAG |
| siRNA 623 | 623 | UGCGGCACAGAGAAAUGCU | 2674 | AGCAUUUCUCUGUGCCGCA |
| siRNA 624 | 624 | GCGGCACAGAGAAAUGCUU | 2675 | AAGCAUUUCUCUGUGCCGC |
| siRNA 625 | 625 | CGGCACAGAGAAAUGCUUU | 2676 | AAAGCAUUUCUCUGUGCCG |
| siRNA 626 | 626 | GGCACAGAGAAAUGCUUUG | 2677 | CAAAGCAUUUCUCUGUGCC |
| siRNA 627 | 627 | GCACAGAGAAAUGCUUUGA | 2678 | UCAAAGCAUUUCUCUGUGC |
| siRNA 628 | 628 | CACAGAGAAAUGCUUUGAU | 2679 | AUCAAAGCAUUUCUCUGUG |
| siRNA 629 | 629 | ACAGAGAAAUGCUUUGAUG | 2680 | CAUCAAAGCAUUUCUCUGU |
| siRNA 630 | 630 | CAGAGAAAUGCUUUGAUGA | 2681 | UCAUCAAAGCAUUUCUCUG |
| siRNA 631 | 631 | AGAGAAAUGCUUUGAUGAG | 2682 | CUCAUCAAAGCAUUUCUCU |
| siRNA 632 | 632 | GAGAAAUGCUUUGAUGAGA | 2683 | UCUCAUCAAAGCAUUUCUC |
| siRNA 633 | 633 | AGAAAUGCUUUGAUGAGAC | 2684 | GUCUCAUCAAAGCAUUUCU |
| siRNA 634 | 634 | GAAAUGCUUUGAUGAGACC | 2685 | GGUCUCAUCAAAGCAUUUC |
| siRNA 635 | 635 | AAAUGCUUUGAUGAGACCC | 2686 | GGGUCUCAUCAAAGCAUUU |
| siRNA 636 | 636 | AAUGCUUUGAUGAGACCCG | 2687 | CGGGUCUCAUCAAAGCAUU |
| siRNA 637 | 637 | AUGCUUUGAUGAGACCCGC | 2688 | GCGGGUCUCAUCAAAGCAU |
| siRNA 638 | 638 | UGCUUUGAUGAGACCCGCU | 2689 | AGCGGGUCUCAUCAAAGCA |
| siRNA 639 | 639 | GCUUUGAUGAGACCCGCUA | 2690 | UAGCGGGUCUCAUCAAAGC |
| siRNA 640 | 640 | CUUUGAUGAGACCCGCUAC | 2691 | GUAGCGGGUCUCAUCAAAG |
| siRNA 641 | 641 | UUUGAUGAGACCCGCUACG | 2692 | CGUAGCGGGUCUCAUCAAA |
| siRNA 642 | 642 | UUGAUGAGACCCGCUACGA | 2693 | UCGUAGCGGGUCUCAUCAA |
| siRNA 643 | 643 | UGAUGAGACCCGCUACGAG | 2694 | CUCGUAGCGGGUCUCAUCA |
| siRNA 644 | 644 | GAUGAGACCCGCUACGAGU | 2695 | ACUCGUAGCGGGUCUCAUC |
| siRNA 645 | 645 | AUGAGACCCGCUACGAGUA | 2696 | UACUCGUAGCGGGUCUCAU |
| siRNA 646 | 646 | UGAGACCCGCUACGAGUAC | 2697 | GUACUCGUAGCGGGUCUCA |
| siRNA 647 | 647 | GAGACCCGCUACGAGUACC | 2698 | GGUACUCGUAGCGGGUCUC |
| siRNA 648 | 648 | AGACCCGCUACGAGUACCU | 2699 | AGGUACUCGUAGCGGGUCU |
| siRNA 649 | 649 | GACCCGCUACGAGUACCUG | 2700 | CAGGUACUCGUAGCGGGUC |
| siRNA 650 | 650 | ACCCGCUACGAGUACCUGG | 2701 | CCAGGUACUCGUAGCGGGU |
| siRNA 651 | 651 | CCCGCUACGAGUACCUGGA | 2702 | UCCAGGUACUCGUAGCGGG |
| siRNA 652 | 652 | CCGCUACGAGUACCUGGAG | 2703 | CUCCAGGUACUCGUAGCGG |
| siRNA 653 | 653 | CGCUACGAGUACCUGGAGG | 2704 | CCUCCAGGUACUCGUAGCG |
| siRNA 654 | 654 | GCUACGAGUACCUGGAGGG | 2705 | CCCUCCAGGUACUCGUAGC |
| siRNA 655 | 655 | CUACGAGUACCUGGAGGGG | 2706 | CCCCUCCAGGUACUCGUAG |
| siRNA 656 | 656 | UACGAGUACCUGGAGGGGG | 2707 | CCCCCUCCAGGUACUCGUA |
| siRNA 657 | 657 | ACGAGUACCUGGAGGGGGG | 2708 | CCCCCCUCCAGGUACUCGU |
| siRNA 658 | 658 | CGAGUACCUGGAGGGGGGC | 2709 | GCCCCCCUCCAGGUACUCG |
| siRNA 659 | 659 | GAGUACCUGGAGGGGGGCG | 2710 | CGCCCCCCUCCAGGUACUC |
| siRNA 660 | 660 | AGUACCUGGAGGGGGGCGA | 2711 | UCGCCCCCCUCCAGGUACU |
| siRNA 661 | 661 | GUACCUGGAGGGGGGCGAC | 2712 | GUCGCCCCCCUCCAGGUAC |
| siRNA 662 | 662 | UACCUGGAGGGGGGCGACC | 2713 | GGUCGCCCCCCUCCAGGUA |
| siRNA 663 | 663 | ACCUGGAGGGGGGCGACCG | 2714 | CGGUCGCCCCCCUCCAGGU |
| siRNA 664 | 664 | CCUGGAGGGGGGCGACCGC | 2715 | GCGGUCGCCCCCCUCCAGG |
| siRNA 665 | 665 | CUGGAGGGGGGCGACCGCU | 2716 | AGCGGUCGCCCCCCUCCAG |
| siRNA 666 | 666 | UGGAGGGGGGCGACCGCUG | 2717 | CAGCGGUCGCCCCCCUCCA |
| siRNA 667 | 667 | GGAGGGGGGCGACCGCUGG | 2718 | CCAGCGGUCGCCCCCCUCC |
| siRNA 668 | 668 | GAGGGGGGCGACCGCUGGG | 2719 | CCCAGCGGUCGCCCCCCUC |
| siRNA 669 | 669 | AGGGGGGCGACCGCUGGGC | 2720 | GCCCAGCGGUCGCCCCCCU |
| siRNA 670 | 670 | GGGGGGCGACCGCUGGGCC | 2721 | GGCCCAGCGGUCGCCCCCC |
| siRNA 671 | 671 | GGGGGCGACCGCUGGGCCC | 2722 | GGGCCCAGCGGUCGCCCCC |
| siRNA 672 | 672 | GGGGCGACCGCUGGGCCCG | 2723 | CGGGCCCAGCGGUCGCCCC |
| siRNA 673 | 673 | GGGCGACCGCUGGGCCCGC | 2724 | GCGGGCCCAGCGGUCGCCC |
| siRNA 674 | 674 | GGCGACCGCUGGGCCCGCG | 2725 | CGCGGGCCCAGCGGUCGCC |
| siRNA 675 | 675 | GCGACCGCUGGGCCCGCGU | 2726 | ACGCGGGCCCAGCGGUCGC |
| siRNA 676 | 676 | CGACCGCUGGGCCCGCGUG | 2727 | CACGCGGGCCCAGCGGUCG |
| siRNA 677 | 677 | GACCGCUGGGCCCGCGUGC | 2728 | GCACGCGGGCCCAGCGGUC |
| siRNA 678 | 678 | ACCGCUGGGCCCGCGUGCG | 2729 | CGCACGCGGGCCCAGCGGU |
| siRNA 679 | 679 | CCGCUGGGCCCGCGUGCGC | 2730 | GCGCACGCGGGCCCAGCGG |
| siRNA 680 | 680 | CGCUGGGCCCGCGUGCGCC | 2731 | GGCGCACGCGGGCCCAGCG |
| siRNA 681 | 681 | GCUGGGCCCGCGUGCGCCA | 2732 | UGGCGCACGCGGGCCCAGC |
| siRNA 682 | 682 | CUGGGCCCGCGUGCGCCAG | 2733 | CUGGCGCACGCGGGCCCAG |
| siRNA 683 | 683 | UGGGCCCGCGUGCGCCAGG | 2734 | CCUGGCGCACGCGGGCCCA |
| siRNA 684 | 684 | GGGCCCGCGUGCGCCAGGG | 2735 | CCCUGGCGCACGCGGGCCC |
| siRNA 685 | 685 | GGCCCGCGUGCGCCAGGGC | 2736 | GCCCUGGCGCACGCGGGCC |
| siRNA 686 | 686 | GCCCGCGUGCGCCAGGGCC | 2737 | GGCCCUGGCGCACGCGGGC |
| siRNA 687 | 687 | CCCGCGUGCGCCAGGGCCA | 2738 | UGGCCCUGGCGCACGCGGG |
| siRNA 688 | 688 | CCGCGUGCGCCAGGGCCAC | 2739 | GUGGCCCUGGCGCACGCGG |
| siRNA 689 | 689 | CGCGUGCGCCAGGGCCACG | 2740 | CGUGGCCCUGGCGCACGCG |
| siRNA 690 | 690 | GCGUGCGCCAGGGCCACGU | 2741 | ACGUGGCCCUGGCGCACGC |
| siRNA 691 | 691 | CGUGCGCCAGGGCCACGUG | 2742 | CACGUGGCCCUGGCGCACG |
| siRNA 692 | 692 | GUGCGCCAGGGCCACGUGG | 2743 | CCACGUGGCCCUGGCGCAC |
| siRNA 693 | 693 | UGCGCCAGGGCCACGUGGA | 2744 | UCCACGUGGCCCUGGCGCA |
| siRNA 694 | 694 | GCGCCAGGGCCACGUGGAA | 2745 | UUCCACGUGGCCCUGGCGC |
| siRNA 695 | 695 | CGCCAGGGCCACGUGGAAC | 2746 | GUUCCACGUGGCCCUGGCG |
| siRNA 696 | 696 | GCCAGGGCCACGUGGAACA | 2747 | UGUUCCACGUGGCCCUGGC |
| siRNA 697 | 697 | CCAGGGCCACGUGGAACAG | 2748 | CUGUUCCACGUGGCCCUGG |
| siRNA 698 | 698 | CAGGGCCACGUGGAACAGU | 2749 | ACUGUUCCACGUGGCCCUG |
| siRNA 699 | 699 | AGGGCCACGUGGAACAGUG | 2750 | CACUGUUCCACGUGGCCCU |
| siRNA 700 | 700 | GGGCCACGUGGAACAGUGC | 2751 | GCACUGUUCCACGUGGCCC |
| siRNA 701 | 701 | GGCCACGUGGAACAGUGCG | 2752 | CGCACUGUUCCACGUGGCC |
| siRNA 702 | 702 | GCCACGUGGAACAGUGCGA | 2753 | UCGCACUGUUCCACGUGGC |
| siRNA 703 | 703 | CCACGUGGAACAGUGCGAG | 2754 | CUCGCACUGUUCCACGUGG |
| siRNA 704 | 704 | CACGUGGAACAGUGCGAGU | 2755 | ACUCGCACUGUUCCACGUG |
| siRNA 705 | 705 | ACGUGGAACAGUGCGAGUG | 2756 | CACUCGCACUGUUCCACGU |
| siRNA 706 | 706 | CGUGGAACAGUGCGAGUGC | 2757 | GCACUCGCACUGUUCCACG |
| siRNA 707 | 707 | GUGGAACAGUGCGAGUGCU | 2758 | AGCACUCGCACUGUUCCAC |
| siRNA 708 | 708 | UGGAACAGUGCGAGUGCUU | 2759 | AAGCACUCGCACUGUUCCA |
| siRNA 709 | 709 | GGAACAGUGCGAGUGCUUC | 2760 | GAAGCACUCGCACUGUUCC |
| siRNA 710 | 710 | GAACAGUGCGAGUGCUUCG | 2761 | CGAAGCACUCGCACUGUUC |
| siRNA 711 | 711 | AACAGUGCGAGUGCUUCGG | 2762 | CCGAAGCACUCGCACUGUU |
| siRNA 712 | 712 | ACAGUGCGAGUGCUUCGGG | 2763 | CCCGAAGCACUCGCACUGU |
| siRNA 713 | 713 | CAGUGCGAGUGCUUCGGGG | 2764 | CCCCGAAGCACUCGCACUG |
| siRNA 714 | 714 | AGUGCGAGUGCUUCGGGGG | 2765 | CCCCCGAAGCACUCGCACU |
| siRNA 715 | 715 | GUGCGAGUGCUUCGGGGGC | 2766 | GCCCCCGAAGCACUCGCAC |
| siRNA 716 | 716 | UGCGAGUGCUUCGGGGGCC | 2767 | GGCCCCCGAAGCACUCGCA |
| siRNA 717 | 717 | GCGAGUGCUUCGGGGGCCG | 2768 | CGGCCCCCGAAGCACUCGC |
| siRNA 718 | 718 | CGAGUGCUUCGGGGGCCGG | 2769 | CCGGCCCCCGAAGCACUCG |
| SiRNA 719 | 719 | GAGUGCUUCGGGGGCCGGA | 2770 | UCCGGCCCCCGAAGCACUC |
| siRNA 720 | 720 | AGUGCUUCGGGGGCCGGAC | 2771 | GUCCGGCCCCCGAAGCACU |
| siRNA 721 | 721 | GUGCUUCGGGGGCCGGACC | 2772 | GGUCCGGCCCCCGAAGCAC |
| siRNA 722 | 722 | UGCUUCGGGGGCCGGACCU | 2773 | AGGUCCGGCCCCCGAAGCA |
| siRNA 723 | 723 | GCUUCGGGGGCCGGACCUG | 2774 | CAGGUCCGGCCCCCGAAGC |
| siRNA 724 | 724 | CUUCGGGGGCCGGACCUGG | 2775 | CCAGGUCCGGCCCCCGAAG |
| siRNA 725 | 725 | UUCGGGGGCCGGACCUGGU | 2776 | ACCAGGUCCGGCCCCCGAA |
| siRNA 726 | 726 | UCGGGGGCCGGACCUGGUG | 2777 | CACCAGGUCCGGCCCCCGA |
| siRNA 727 | 727 | CGGGGGCCGGACCUGGUGC | 2778 | GCACCAGGUCCGGCCCCCG |
| siRNA 728 | 728 | GGGGGCCGGACCUGGUGCG | 2779 | CGCACCAGGUCCGGCCCCC |
| siRNA 729 | 729 | GGGGCCGGACCUGGUGCGA | 2780 | UCGCACCAGGUCCGGCCCC |
| siRNA 730 | 730 | GGGCCGGACCUGGUGCGAA | 2781 | UUCGCACCAGGUCCGGCCC |
| siRNA 731 | 731 | GGCCGGACCUGGUGCGAAG | 2782 | CUUCGCACCAGGUCCGGCC |
| siRNA 732 | 732 | GCCGGACCUGGUGCGAAGG | 2783 | CCUUCGCACCAGGUCCGGC |
| siRNA 733 | 733 | CCGGACCUGGUGCGAAGGC | 2784 | GCCUUCGCACCAGGUCCGG |
| siRNA 734 | 734 | CGGACCUGGUGCGAAGGCA | 2785 | UGCCUUCGCACCAGGUCCG |
| siRNA 735 | 735 | GGACCUGGUGCGAAGGCAC | 2786 | GUGCCUUCGCACCAGGUCC |
| siRNA 736 | 736 | GACCUGGUGCGAAGGCACC | 2787 | GGUGCCUUCGCACCAGGUC |
| siRNA 737 | 737 | ACCUGGUGCGAAGGCACCC | 2788 | GGGUGCCUUCGCACCAGGU |
| siRNA 738 | 738 | CCUGGUGCGAAGGCACCCG | 2789 | CGGGUGCCUUCGCACCAGG |
| siRNA 739 | 739 | CUGGUGCGAAGGCACCCGA | 2790 | UCGGGUGCCUUCGCACCAG |
| siRNA 740 | 740 | UGGUGCGAAGGCACCCGAC | 2791 | GUCGGGUGCCUUCGCACCA |
| siRNA 741 | 741 | GGUGCGAAGGCACCCGACA | 2792 | UGUCGGGUGCCUUCGCACC |
| siRNA 742 | 742 | GUGCGAAGGCACCCGACAU | 2793 | AUGUCGGGUGCCUUCGCAC |
| siRNA 743 | 743 | UGCGAAGGCACCCGACAUA | 2794 | UAUGUCGGGUGCCUUCGCA |
| siRNA 744 | 744 | GCGAAGGCACCCGACAUAC | 2795 | GUAUGUCGGGUGCCUUCGC |
| siRNA 745 | 745 | CGAAGGCACCCGACAUACA | 2796 | UGUAUGUCGGGUGCCUUCG |
| siRNA 746 | 746 | GAAGGCACCCGACAUACAG | 2797 | CUGUAUGUCGGGUGCCUUC |
| siRNA 747 | 747 | AAGGCACCCGACAUACAGC | 2798 | GCUGUAUGUCGGGUGCCUU |
| siRNA 748 | 748 | AGGCACCCGACAUACAGCU | 2799 | AGCUGUAUGUCGGGUGCCU |
| siRNA 749 | 749 | GGCACCCGACAUACAGCUU | 2800 | AAGCUGUAUGUCGGGUGCC |
| siRNA 750 | 750 | GCACCCGACAUACAGCUUG | 2801 | CAAGCUGUAUGUCGGGUGC |
| siRNA 751 | 751 | CACCCGACAUACAGCUUGU | 2802 | ACAAGCUGUAUGUCGGGUG |
| siRNA 752 | 752 | ACCCGACAUACAGCUUGUC | 2803 | GACAAGCUGUAUGUCGGGU |
| siRNA 753 | 753 | CCCGACAUACAGCUUGUCU | 2804 | AGACAAGCUGUAUGUCGGG |
| siRNA 754 | 754 | CCGACAUACAGCUUGUCUG | 2805 | CAGACAAGCUGUAUGUCGG |
| siRNA 755 | 755 | CGACAUACAGCUUGUCUGA | 2806 | UCAGACAAGCUGUAUGUCG |
| siRNA 756 | 756 | GACAUACAGCUUGUCUGAG | 2807 | CUCAGACAAGCUGUAUGUC |
| siRNA 757 | 757 | ACAUACAGCUUGUCUGAGC | 2808 | GCUCAGACAAGCUGUAUGU |
| siRNA 758 | 758 | CAUACAGCUUGUCUGAGCA | 2809 | UGCUCAGACAAGCUGUAUG |
| siRNA 759 | 759 | AUACAGCUUGUCUGAGCAG | 2810 | CUGCUCAGACAAGCUGUAU |
| siRNA 760 | 760 | UACAGCUUGUCUGAGCAGC | 2811 | GCUGCUCAGACAAGCUGUA |
| siRNA 761 | 761 | ACAGCUUGUCUGAGCAGCC | 2812 | GGCUGCUCAGACAAGCUGU |
| siRNA 762 | 762 | CAGCUUGUCUGAGCAGCCC | 2813 | GGGCUGCUCAGACAAGCUG |
| siRNA 763 | 763 | AGCUUGUCUGAGCAGCCCU | 2814 | AGGGCUGCUCAGACAAGCU |
| siRNA 764 | 764 | GCUUGUCUGAGCAGCCCUU | 2815 | AAGGGCUGCUCAGACAAGC |
| siRNA 765 | 765 | CUUGUCUGAGCAGCCCUUG | 2816 | CAAGGGCUGCUCAGACAAG |
| siRNA 766 | 766 | UUGUCUGAGCAGCCCUUGC | 2817 | GCAAGGGCUGCUCAGACAA |
| siRNA 767 | 767 | UGUCUGAGCAGCCCUUGCC | 2818 | GGCAAGGGCUGCUCAGACA |
| siRNA 768 | 768 | GUCUGAGCAGCCCUUGCCU | 2819 | AGGCAAGGGCUGCUCAGAC |
| siRNA 769 | 769 | UCUGAGCAGCCCUUGCCUG | 2820 | CAGGCAAGGGCUGCUCAGA |
| siRNA 770 | 770 | CUGAGCAGCCCUUGCCUGA | 2821 | UCAGGCAAGGGCUGCUCAG |
| siRNA 771 | 771 | UGAGCAGCCCUUGCCUGAA | 2822 | UUCAGGCAAGGGCUGCUCA |
| siRNA 772 | 772 | GAGCAGCCCUUGCCUGAAC | 2823 | GUUCAGGCAAGGGCUGCUC |
| siRNA 773 | 773 | AGCAGCCCUUGCCUGAACG | 2824 | CGUUCAGGCAAGGGCUGCU |
| siRNA 774 | 774 | GCAGCCCUUGCCUGAACGG | 2825 | CCGUUCAGGCAAGGGCUGC |
| siRNA 775 | 775 | CAGCCCUUGCCUGAACGGG | 2826 | CCCGUUCAGGCAAGGGCUG |
| siRNA 776 | 776 | AGCCCUUGCCUGAACGGGG | 2827 | CCCCGUUCAGGCAAGGGCU |
| siRNA 777 | 777 | GCCCUUGCCUGAACGGGGG | 2828 | CCCCCGUUCAGGCAAGGGC |
| siRNA 778 | 778 | CCCUUGCCUGAACGGGGGC | 2829 | GCCCCCGUUCAGGCAAGGG |
| siRNA 779 | 779 | CCUUGCCUGAACGGGGGCA | 2830 | UGCCCCCGUUCAGGCAAGG |
| siRNA 780 | 780 | CUUGCCUGAACGGGGGCAC | 2831 | GUGCCCCCGUUCAGGCAAG |
| siRNA 781 | 781 | UUGCCUGAACGGGGGCACC | 2832 | GGUGCCCCCGUUCAGGCAA |
| siRNA 782 | 782 | UGCCUGAACGGGGGCACCU | 2833 | AGGUGCCCCCGUUCAGGCA |
| siRNA 783 | 783 | GCCUGAACGGGGGCACCUG | 2834 | CAGGUGCCCCCGUUCAGGC |
| siRNA 784 | 784 | CCUGAACGGGGGCACCUGC | 2835 | GCAGGUGCCCCCGUUCAGG |
| siRNA 785 | 785 | CUGAACGGGGGCACCUGCC | 2836 | GGCAGGUGCCCCCGUUCAG |
| siRNA 786 | 786 | UGAACGGGGGCACCUGCCA | 2837 | UGGCAGGUGCCCCCGUUCA |
| siRNA 787 | 787 | GAACGGGGGCACCUGCCAC | 2838 | GUGGCAGGUGCCCCCGUUC |
| siRNA 788 | 788 | AACGGGGGCACCUGCCACC | 2839 | GGUGGCAGGUGCCCCCGUU |
| siRNA 789 | 789 | ACGGGGGCACCUGCCACCU | 2840 | AGGUGGCAGGUGCCCCCGU |
| siRNA 790 | 790 | CGGGGGCACCUGCCACCUG | 2841 | CAGGUGGCAGGUGCCCCCG |
| siRNA 791 | 791 | GGGGGCACCUGCCACCUGA | 2842 | UCAGGUGGCAGGUGCCCCC |
| siRNA 792 | 792 | GGGGCACCUGCCACCUGAU | 2843 | AUCAGGUGGCAGGUGCCCC |
| siRNA 793 | 793 | GGGCACCUGCCACCUGAUC | 2844 | GAUCAGGUGGCAGGUGCCC |
| siRNA 794 | 794 | GGCACCUGCCACCUGAUCG | 2845 | CGAUCAGGUGGCAGGUGCC |
| siRNA 795 | 795 | GCACCUGCCACCUGAUCGU | 2846 | ACGAUCAGGUGGCAGGUGC |
| siRNA 796 | 796 | CACCUGCCACCUGAUCGUG | 2847 | CACGAUCAGGUGGCAGGUG |
| siRNA 797 | 797 | ACCUGCCACCUGAUCGUGG | 2848 | CCACGAUCAGGUGGCAGGU |
| siRNA 798 | 798 | CCUGCCACCUGAUCGUGGC | 2849 | GCCACGAUCAGGUGGCAGG |
| siRNA 799 | 799 | CUGCCACCUGAUCGUGGCC | 2850 | GGCCACGAUCAGGUGGCAG |
| siRNA 800 | 800 | UGCCACCUGAUCGUGGCCA | 2851 | UGGCCACGAUCAGGUGGCA |
| siRNA 801 | 801 | GCCACCUGAUCGUGGCCAC | 2852 | GUGGCCACGAUCAGGUGGC |
| siRNA 802 | 802 | CCACCUGAUCGUGGCCACC | 2853 | GGUGGCCACGAUCAGGUGG |
| siRNA 803 | 803 | CACCUGAUCGUGGCCACCG | 2854 | CGGUGGCCACGAUCAGGUG |
| siRNA 804 | 804 | ACCUGAUCGUGGCCACCGG | 2855 | CCGGUGGCCACGAUCAGGU |
| siRNA 805 | 805 | CCUGAUCGUGGCCACCGGG | 2856 | CCCGGUGGCCACGAUCAGG |
| siRNA 806 | 806 | CUGAUCGUGGCCACCGGGA | 2857 | UCCCGGUGGCCACGAUCAG |
| siRNA 807 | 807 | UGAUCGUGGCCACCGGGAC | 2858 | GUCCCGGUGGCCACGAUCA |
| siRNA 808 | 808 | GAUCGUGGCCACCGGGACC | 2859 | GGUCCCGGUGGCCACGAUC |
| siRNA 809 | 809 | AUCGUGGCCACCGGGACCA | 2860 | UGGUCCCGGUGGCCACGAU |
| siRNA 810 | 810 | UCGUGGCCACCGGGACCAC | 2861 | GUGGUCCCGGUGGCCACGA |
| siRNA 811 | 811 | CGUGGCCACCGGGACCACC | 2862 | GGUGGUCCCGGUGGCCACG |
| siRNA 812 | 812 | GUGGCCACCGGGACCACCG | 2863 | CGGUGGUCCCGGUGGCCAC |
| siRNA 813 | 813 | UGGCCACCGGGACCACCGU | 2864 | ACGGUGGUCCCGGUGGCCA |
| siRNA 814 | 814 | GGCCACCGGGACCACCGUG | 2865 | CACGGUGGUCCCGGUGGCC |
| siRNA 815 | 815 | GCCACCGGGACCACCGUGU | 2866 | ACACGGUGGUCCCGGUGGC |
| siRNA 816 | 816 | CCACCGGGACCACCGUGUG | 2867 | CACACGGUGGUCCCGGUGG |
| siRNA 817 | 817 | CACCGGGACCACCGUGUGU | 2868 | ACACACGGUGGUCCCGGUG |
| siRNA 818 | 818 | ACCGGGACCACCGUGUGUG | 2869 | CACACACGGUGGUCCCGGU |
| siRNA 819 | 819 | CCGGGACCACCGUGUGUGC | 2870 | GCACACACGGUGGUCCCGG |
| siRNA 820 | 820 | CGGGACCACCGUGUGUGCC | 2871 | GGCACACACGGUGGUCCCG |
| siRNA 821 | 821 | GGGACCACCGUGUGUGCCU | 2872 | AGGCACACACGGUGGUCCC |
| siRNA 822 | 822 | GGACCACCGUGUGUGCCUG | 2873 | CAGGCACACACGGUGGUCC |
| siRNA 823 | 823 | GACCACCGUGUGUGCCUGC | 2874 | GCAGGCACACACGGUGGUC |
| siRNA 824 | 824 | ACCACCGUGUGUGCCUGCC | 2875 | GGCAGGCACACACGGUGGU |
| siRNA 825 | 825 | CCACCGUGUGUGCCUGCCC | 2876 | GGGCAGGCACACACGGUGG |
| siRNA 826 | 826 | CACCGUGUGUGCCUGCCCA | 2877 | UGGGCAGGCACACACGGUG |
| siRNA 827 | 827 | ACCGUGUGUGCCUGCCCAC | 2878 | GUGGGCAGGCACACACGGU |
| siRNA 828 | 828 | CCGUGUGUGCCUGCCCACC | 2879 | GGUGGGCAGGCACACACGG |
| siRNA 829 | 829 | CGUGUGUGCCUGCCCACCA | 2880 | UGGUGGGCAGGCACACACG |
| siRNA 830 | 830 | GUGUGUGCCUGCCCACCAG | 2881 | CUGGUGGGCAGGCACACAC |
| siRNA 831 | 831 | UGUGUGCCUGCCCACCAGG | 2882 | CCUGGUGGGCAGGCACACA |
| siRNA 832 | 832 | GUGUGCCUGCCCACCAGGC | 2883 | GCCUGGUGGGCAGGCACAC |
| siRNA 833 | 833 | UGUGCCUGCCCACCAGGCU | 2884 | AGCCUGGUGGGCAGGCACA |
| siRNA 834 | 834 | GUGCCUGCCCACCAGGCUU | 2885 | AAGCCUGGUGGGCAGGCAC |
| siRNA 835 | 835 | UGCCUGCCCACCAGGCUUC | 2886 | GAAGCCUGGUGGGCAGGCA |
| siRNA 836 | 836 | GCCUGCCCACCAGGCUUCG | 2887 | CGAAGCCUGGUGGGCAGGC |
| siRNA 837 | 837 | CCUGCCCACCAGGCUUCGC | 2888 | GCGAAGCCUGGUGGGCAGG |
| siRNA 838 | 838 | CUGCCCACCAGGCUUCGCU | 2889 | AGCGAAGCCUGGUGGGCAG |
| siRNA 839 | 839 | UGCCCACCAGGCUUCGCUG | 2890 | CAGCGAAGCCUGGUGGGCA |
| siRNA 840 | 840 | GCCCACCAGGCUUCGCUGG | 2891 | CCAGCGAAGCCUGGUGGGC |
| siRNA 841 | 841 | CCCACCAGGCUUCGCUGGA | 2892 | UCCAGCGAAGCCUGGUGGG |
| siRNA 842 | 842 | CCACCAGGCUUCGCUGGAC | 2893 | GUCCAGCGAAGCCUGGUGG |
| siRNA 843 | 843 | CACCAGGCUUCGCUGGACG | 2894 | CGUCCAGCGAAGCCUGGUG |
| siRNA 844 | 844 | ACCAGGCUUCGCUGGACGG | 2895 | CCGUCCAGCGAAGCCUGGU |
| siRNA 845 | 845 | CCAGGCUUCGCUGGACGGC | 2896 | GCCGUCCAGCGAAGCCUGG |
| siRNA 846 | 846 | CAGGCUUCGCUGGACGGCU | 2897 | AGCCGUCCAGCGAAGCCUG |
| siRNA 847 | 847 | AGGCUUCGCUGGACGGCUC | 2898 | GAGCCGUCCAGCGAAGCCU |
| siRNA 848 | 848 | GGCUUCGCUGGACGGCUCU | 2899 | AGAGCCGUCCAGCGAAGCC |
| siRNA 849 | 849 | GCUUCGCUGGACGGCUCUG | 2900 | CAGAGCCGUCCAGCGAAGC |
| siRNA 850 | 850 | CUUCGCUGGACGGCUCUGC | 2901 | GCAGAGCCGUCCAGCGAAG |
| siRNA 851 | 851 | UUCGCUGGACGGCUCUGCA | 2902 | UGCAGAGCCGUCCAGCGAA |
| siRNA 852 | 852 | UCGCUGGACGGCUCUGCAA | 2903 | UUGCAGAGCCGUCCAGCGA |
| siRNA 853 | 853 | CGCUGGACGGCUCUGCAAC | 2904 | GUUGCAGAGCCGUCCAGCG |
| siRNA 854 | 854 | GCUGGACGGCUCUGCAACA | 2905 | UGUUGCAGAGCCGUCCAGC |
| siRNA 855 | 855 | CUGGACGGCUCUGCAACAU | 2906 | AUGUUGCAGAGCCGUCCAG |
| siRNA 856 | 856 | UGGACGGCUCUGCAACAUC | 2907 | GAUGUUGCAGAGCCGUCCA |
| siRNA 857 | 857 | GGACGGCUCUGCAACAUCG | 2908 | CGAUGUUGCAGAGCCGUCC |
| siRNA 858 | 858 | GACGGCUCUGCAACAUCGA | 2909 | UCGAUGUUGCAGAGCCGUC |
| siRNA 859 | 859 | ACGGCUCUGCAACAUCGAG | 2910 | CUCGAUGUUGCAGAGCCGU |
| siRNA 860 | 860 | CGGCUCUGCAACAUCGAGC | 2911 | GCUCGAUGUUGCAGAGCCG |
| siRNA 861 | 861 | GGCUCUGCAACAUCGAGCC | 2912 | GGCUCGAUGUUGCAGAGCC |
| siRNA 862 | 862 | GCUCUGCAACAUCGAGCCU | 2913 | AGGCUCGAUGUUGCAGAGC |
| siRNA 863 | 863 | CUCUGCAACAUCGAGCCUG | 2914 | CAGGCUCGAUGUUGCAGAG |
| siRNA 864 | 864 | UCUGCAACAUCGAGCCUGA | 2915 | UCAGGCUCGAUGUUGCAGA |
| siRNA 865 | 865 | CUGCAACAUCGAGCCUGAU | 2916 | AUCAGGCUCGAUGUUGCAG |
| siRNA 866 | 866 | UGCAACAUCGAGCCUGAUG | 2917 | CAUCAGGCUCGAUGUUGCA |
| siRNA 867 | 867 | GCAACAUCGAGCCUGAUGA | 2918 | UCAUCAGGCUCGAUGUUGC |
| siRNA 868 | 868 | CAACAUCGAGCCUGAUGAG | 2919 | CUCAUCAGGCUCGAUGUUG |
| siRNA 869 | 869 | AACAUCGAGCCUGAUGAGC | 2920 | GCUCAUCAGGCUCGAUGUU |
| siRNA 870 | 870 | ACAUCGAGCCUGAUGAGCG | 2921 | CGCUCAUCAGGCUCGAUGU |
| siRNA 871 | 871 | CAUCGAGCCUGAUGAGCGC | 2922 | GCGCUCAUCAGGCUCGAUG |
| siRNA 872 | 872 | AUCGAGCCUGAUGAGCGCU | 2923 | AGCGCUCAUCAGGCUCGAU |
| siRNA 873 | 873 | UCGAGCCUGAUGAGCGCUG | 2924 | CAGCGCUCAUCAGGCUCGA |
| siRNA 874 | 874 | CGAGCCUGAUGAGCGCUGC | 2925 | GCAGCGCUCAUCAGGCUCG |
| siRNA 875 | 875 | GAGCCUGAUGAGCGCUGCU | 2926 | AGCAGCGCUCAUCAGGCUC |
| siRNA 876 | 876 | AGCCUGAUGAGCGCUGCUU | 2927 | AAGCAGCGCUCAUCAGGCU |
| siRNA 877 | 877 | GCCUGAUGAGCGCUGCUUC | 2928 | GAAGCAGCGCUCAUCAGGC |
| siRNA 878 | 878 | CCUGAUGAGCGCUGCUUCU | 2929 | AGAAGCAGCGCUCAUCAGG |
| siRNA 879 | 879 | CUGAUGAGCGCUGCUUCUU | 2930 | AAGAAGCAGCGCUCAUCAG |
| siRNA 880 | 880 | UGAUGAGCGCUGCUUCUUG | 2931 | CAAGAAGCAGCGCUCAUCA |
| siRNA 881 | 881 | GAUGAGCGCUGCUUCUUGG | 2932 | CCAAGAAGCAGCGCUCAUC |
| siRNA 882 | 882 | AUGAGCGCUGCUUCUUGGG | 2933 | CCCAAGAAGCAGCGCUCAU |
| siRNA 883 | 883 | UGAGCGCUGCUUCUUGGGG | 2934 | CCCCAAGAAGCAGCGCUCA |
| siRNA 884 | 884 | GAGCGCUGCUUCUUGGGGA | 2935 | UCCCCAAGAAGCAGCGCUC |
| siRNA 885 | 885 | AGCGCUGCUUCUUGGGGAA | 2936 | UUCCCCAAGAAGCAGCGCU |
| siRNA 886 | 886 | GCGCUGCUUCUUGGGGAAC | 2937 | GUUCCCCAAGAAGCAGCGC |
| siRNA 887 | 887 | CGCUGCUUCUUGGGGAACG | 2938 | CGUUCCCCAAGAAGCAGCG |
| siRNA 888 | 888 | GCUGCUUCUUGGGGAACGG | 2939 | CCGUUCCCCAAGAAGCAGC |
| siRNA 889 | 889 | CUGCUUCUUGGGGAACGGC | 2940 | GCCGUUCCCCAAGAAGCAG |
| siRNA 890 | 890 | UGCUUCUUGGGGAACGGCA | 2941 | UGCCGUUCCCCAAGAAGCA |
| siRNA 891 | 891 | GCUUCUUGGGGAACGGCAC | 2942 | GUGCCGUUCCCCAAGAAGC |
| siRNA 892 | 892 | CUUCUUGGGGAACGGCACU | 2943 | AGUGCCGUUCCCCAAGAAG |
| siRNA 893 | 893 | UUCUUGGGGAACGGCACUG | 2944 | CAGUGCCGUUCCCCAAGAA |
| siRNA 894 | 894 | UCUUGGGGAACGGCACUGG | 2945 | CCAGUGCCGUUCCCCAAGA |
| siRNA 895 | 895 | CUUGGGGAACGGCACUGGG | 2946 | CCCAGUGCCGUUCCCCAAG |
| siRNA 896 | 896 | UUGGGGAACGGCACUGGGU | 2947 | ACCCAGUGCCGUUCCCCAA |
| siRNA 897 | 897 | UGGGGAACGGCACUGGGUA | 2948 | UACCCAGUGCCGUUCCCCA |
| siRNA 898 | 898 | GGGGAACGGCACUGGGUAC | 2949 | GUACCCAGUGCCGUUCCCC |
| siRNA 899 | 899 | GGGAACGGCACUGGGUACC | 2950 | GGUACCCAGUGCCGUUCCC |
| siRNA 900 | 900 | GGAACGGCACUGGGUACCG | 2951 | CGGUACCCAGUGCCGUUCC |
| siRNA 901 | 901 | GAACGGCACUGGGUACCGU | 2952 | ACGGUACCCAGUGCCGUUC |
| siRNA 902 | 902 | AACGGCACUGGGUACCGUG | 2953 | CACGGUACCCAGUGCCGUU |
| siRNA 903 | 903 | ACGGCACUGGGUACCGUGG | 2954 | CCACGGUACCCAGUGCCGU |
| siRNA 904 | 904 | CGGCACUGGGUACCGUGGC | 2955 | GCCACGGUACCCAGUGCCG |
| siRNA 905 | 905 | GGCACUGGGUACCGUGGCG | 2956 | CGCCACGGUACCCAGUGCC |
| siRNA 906 | 906 | GCACUGGGUACCGUGGCGU | 2957 | ACGCCACGGUACCCAGUGC |
| siRNA 907 | 907 | CACUGGGUACCGUGGCGUG | 2958 | CACGCCACGGUACCCAGUG |
| siRNA 908 | 908 | ACUGGGUACCGUGGCGUGG | 2959 | CCACGCCACGGUACCCAGU |
| siRNA 909 | 909 | CUGGGUACCGUGGCGUGGC | 2960 | GCCACGCCACGGUACCCAG |
| siRNA 910 | 910 | UGGGUACCGUGGCGUGGCC | 2961 | GGCCACGCCACGGUACCCA |
| siRNA 911 | 911 | GGGUACCGUGGCGUGGCCA | 2962 | UGGCCACGCCACGGUACCC |
| siRNA 912 | 912 | GGUACCGUGGCGUGGCCAG | 2963 | CUGGCCACGCCACGGUACC |
| siRNA 913 | 913 | GUACCGUGGCGUGGCCAGC | 2964 | GCUGGCCACGCCACGGUAC |
| siRNA 914 | 914 | UACCGUGGCGUGGCCAGCA | 2965 | UGCUGGCCACGCCACGGUA |
| siRNA 915 | 915 | ACCGUGGCGUGGCCAGCAC | 2966 | GUGCUGGCCACGCCACGGU |
| siRNA 916 | 916 | CCGUGGCGUGGCCAGCACC | 2967 | GGUGCUGGCCACGCCACGG |
| siRNA 917 | 917 | CGUGGCGUGGCCAGCACCU | 2968 | AGGUGCUGGCCACGCCACG |
| siRNA 918 | 918 | GUGGCGUGGCCAGCACCUC | 2969 | GAGGUGCUGGCCACGCCAC |
| siRNA 919 | 919 | UGGCGUGGCCAGCACCUCA | 2970 | UGAGGUGCUGGCCACGCCA |
| siRNA 920 | 920 | GGCGUGGCCAGCACCUCAG | 2971 | CUGAGGUGCUGGCCACGCC |
| siRNA 921 | 921 | GCGUGGCCAGCACCUCAGC | 2972 | GCUGAGGUGCUGGCCACGC |
| siRNA 922 | 922 | CGUGGCCAGCACCUCAGCC | 2973 | GGCUGAGGUGCUGGCCACG |
| siRNA 923 | 923 | GUGGCCAGCACCUCAGCCU | 2974 | AGGCUGAGGUGCUGGCCAC |
| siRNA 924 | 924 | UGGCCAGCACCUCAGCCUC | 2975 | GAGGCUGAGGUGCUGGCCA |
| siRNA 925 | 925 | GGCCAGCACCUCAGCCUCG | 2976 | CGAGGCUGAGGUGCUGGCC |
| siRNA 926 | 926 | GCCAGCACCUCAGCCUCGG | 2977 | CCGAGGCUGAGGUGCUGGC |
| siRNA 927 | 927 | CCAGCACCUCAGCCUCGGG | 2978 | CCCGAGGCUGAGGUGCUGG |
| siRNA 928 | 928 | CAGCACCUCAGCCUCGGGC | 2979 | GCCCGAGGCUGAGGUGCUG |
| siRNA 929 | 929 | AGCACCUCAGCCUCGGGCC | 2980 | GGCCCGAGGCUGAGGUGCU |
| siRNA 930 | 930 | GCACCUCAGCCUCGGGCCU | 2981 | AGGCCCGAGGCUGAGGUGC |
| siRNA 931 | 931 | CACCUCAGCCUCGGGCCUC | 2982 | GAGGCCCGAGGCUGAGGUG |
| siRNA 932 | 932 | ACCUCAGCCUCGGGCCUCA | 2983 | UGAGGCCCGAGGCUGAGGU |
| siRNA 933 | 933 | CCUCAGCCUCGGGCCUCAG | 2984 | CUGAGGCCCGAGGCUGAGG |
| siRNA 934 | 934 | CUCAGCCUCGGGCCUCAGC | 2985 | GCUGAGGCCCGAGGCUGAG |
| siRNA 935 | 935 | UCAGCCUCGGGCCUCAGCU | 2986 | AGCUGAGGCCCGAGGCUGA |
| siRNA 936 | 936 | CAGCCUCGGGCCUCAGCUG | 2987 | CAGCUGAGGCCCGAGGCUG |
| siRNA 937 | 937 | AGCCUCGGGCCUCAGCUGC | 2988 | GCAGCUGAGGCCCGAGGCU |
| siRNA 938 | 938 | GCCUCGGGCCUCAGCUGCC | 2989 | GGCAGCUGAGGCCCGAGGC |
| siRNA 939 | 939 | CCUCGGGCCUCAGCUGCCU | 2990 | AGGCAGCUGAGGCCCGAGG |
| siRNA 940 | 940 | CUCGGGCCUCAGCUGCCUG | 2991 | CAGGCAGCUGAGGCCCGAG |
| siRNA 941 | 941 | UCGGGCCUCAGCUGCCUGG | 2992 | CCAGGCAGCUGAGGCCCGA |
| siRNA 942 | 942 | CGGGCCUCAGCUGCCUGGC | 2993 | GCCAGGCAGCUGAGGCCCG |
| siRNA 943 | 943 | GGGCCUCAGCUGCCUGGCC | 2994 | GGCCAGGCAGCUGAGGCCC |
| siRNA 944 | 944 | GGCCUCAGCUGCCUGGCCU | 2995 | AGGCCAGGCAGCUGAGGCC |
| siRNA 945 | 945 | GCCUCAGCUGCCUGGCCUG | 2996 | CAGGCCAGGCAGCUGAGGC |
| siRNA 946 | 946 | CCUCAGCUGCCUGGCCUGG | 2997 | CCAGGCCAGGCAGCUGAGG |
| siRNA 947 | 947 | CUCAGCUGCCUGGCCUGGA | 2998 | UCCAGGCCAGGCAGCUGAG |
| siRNA 948 | 948 | UCAGCUGCCUGGCCUGGAA | 2999 | UUCCAGGCCAGGCAGCUGA |
| siRNA 949 | 949 | CAGCUGCCUGGCCUGGAAC | 3000 | GUUCCAGGCCAGGCAGCUG |
| siRNA 950 | 950 | AGCUGCCUGGCCUGGAACU | 3001 | AGUUCCAGGCCAGGCAGCU |
| siRNA 951 | 951 | GCUGCCUGGCCUGGAACUC | 3002 | GAGUUCCAGGCCAGGCAGC |
| siRNA 952 | 952 | CUGCCUGGCCUGGAACUCC | 3003 | GGAGUUCCAGGCCAGGCAG |
| siRNA 953 | 953 | UGCCUGGCCUGGAACUCCG | 3004 | CGGAGUUCCAGGCCAGGCA |
| siRNA 954 | 954 | GCCUGGCCUGGAACUCCGA | 3005 | UCGGAGUUCCAGGCCAGGC |
| siRNA 955 | 955 | CCUGGCCUGGAACUCCGAU | 3006 | AUCGGAGUUCCAGGCCAGG |
| siRNA 956 | 956 | CUGGCCUGGAACUCCGAUC | 3007 | GAUCGGAGUUCCAGGCCAG |
| siRNA 957 | 957 | UGGCCUGGAACUCCGAUCU | 3008 | AGAUCGGAGUUCCAGGCCA |
| siRNA 958 | 958 | GGCCUGGAACUCCGAUCUG | 3009 | CAGAUCGGAGUUCCAGGCC |
| siRNA 959 | 959 | GCCUGGAACUCCGAUCUGC | 3010 | GCAGAUCGGAGUUCCAGGC |
| siRNA 960 | 960 | CCUGGAACUCCGAUCUGCU | 3011 | AGCAGAUCGGAGUUCCAGG |
| siRNA 961 | 961 | CUGGAACUCCGAUCUGCUC | 3012 | GAGCAGAUCGGAGUUCCAG |
| siRNA 962 | 962 | UGGAACUCCGAUCUGCUCU | 3013 | AGAGCAGAUCGGAGUUCCA |
| siRNA 963 | 963 | GGAACUCCGAUCUGCUCUA | 3014 | UAGAGCAGAUCGGAGUUCC |
| siRNA 964 | 964 | GAACUCCGAUCUGCUCUAC | 3015 | GUAGAGCAGAUCGGAGUUC |
| siRNA 965 | 965 | AACUCCGAUCUGCUCUACC | 3016 | GGUAGAGCAGAUCGGAGUU |
| siRNA 966 | 966 | ACUCCGAUCUGCUCUACCA | 3017 | UGGUAGAGCAGAUCGGAGU |
| siRNA 967 | 967 | CUCCGAUCUGCUCUACCAG | 3018 | CUGGUAGAGCAGAUCGGAG |
| siRNA 968 | 968 | UCCGAUCUGCUCUACCAGG | 3019 | CCUGGUAGAGCAGAUCGGA |
| siRNA 969 | 969 | CCGAUCUGCUCUACCAGGA | 3020 | UCCUGGUAGAGCAGAUCGG |
| siRNA 970 | 970 | CGAUCUGCUCUACCAGGAG | 3021 | CUCCUGGUAGAGCAGAUCG |
| siRNA 971 | 971 | GAUCUGCUCUACCAGGAGC | 3022 | GCUCCUGGUAGAGCAGAUC |
| siRNA 972 | 972 | AUCUGCUCUACCAGGAGCU | 3023 | AGCUCCUGGUAGAGCAGAU |
| siRNA 973 | 973 | UCUGCUCUACCAGGAGCUG | 3024 | CAGCUCCUGGUAGAGCAGA |
| siRNA 974 | 974 | CUGCUCUACCAGGAGCUGC | 3025 | GCAGCUCCUGGUAGAGCAG |
| siRNA 975 | 975 | UGCUCUACCAGGAGCUGCA | 3026 | UGCAGCUCCUGGUAGAGCA |
| siRNA 976 | 976 | GCUCUACCAGGAGCUGCAC | 3027 | GUGCAGCUCCUGGUAGAGC |
| siRNA 977 | 977 | CUCUACCAGGAGCUGCACG | 3028 | CGUGCAGCUCCUGGUAGAG |
| siRNA 978 | 978 | UCUACCAGGAGCUGCACGU | 3029 | ACGUGCAGCUCCUGGUAGA |
| siRNA 979 | 979 | CUACCAGGAGCUGCACGUG | 3030 | CACGUGCAGCUCCUGGUAG |
| siRNA 980 | 980 | UACCAGGAGCUGCACGUGG | 3031 | CCACGUGCAGCUCCUGGUA |
| siRNA 981 | 981 | ACCAGGAGCUGCACGUGGA | 3032 | UCCACGUGCAGCUCCUGGU |
| siRNA 982 | 982 | CCAGGAGCUGCACGUGGAC | 3033 | GUCCACGUGCAGCUCCUGG |
| siRNA 983 | 983 | CAGGAGCUGCACGUGGACU | 3034 | AGUCCACGUGCAGCUCCUG |
| siRNA 984 | 984 | AGGAGCUGCACGUGGACUC | 3035 | GAGUCCACGUGCAGCUCCU |
| siRNA 985 | 985 | GGAGCUGCACGUGGACUCC | 3036 | GGAGUCCACGUGCAGCUCC |
| siRNA 986 | 986 | GAGCUGCACGUGGACUCCG | 3037 | CGGAGUCCACGUGCAGCUC |
| siRNA 987 | 987 | AGCUGCACGUGGACUCCGU | 3038 | ACGGAGUCCACGUGCAGCU |
| siRNA 988 | 988 | GCUGCACGUGGACUCCGUG | 3039 | CACGGAGUCCACGUGCAGC |
| siRNA 989 | 989 | CUGCACGUGGACUCCGUGG | 3040 | CCACGGAGUCCACGUGCAG |
| siRNA 990 | 990 | UGCACGUGGACUCCGUGGG | 3041 | CCCACGGAGUCCACGUGCA |
| siRNA 991 | 991 | GCACGUGGACUCCGUGGGC | 3042 | GCCCACGGAGUCCACGUGC |
| siRNA 992 | 992 | CACGUGGACUCCGUGGGCG | 3043 | CGCCCACGGAGUCCACGUG |
| siRNA 993 | 993 | ACGUGGACUCCGUGGGCGC | 3044 | GCGCCCACGGAGUCCACGU |
| siRNA 994 | 994 | CGUGGACUCCGUGGGCGCC | 3045 | GGCGCCCACGGAGUCCACG |
| siRNA 995 | 995 | GUGGACUCCGUGGGCGCCG | 3046 | CGGCGCCCACGGAGUCCAC |
| siRNA 996 | 996 | UGGACUCCGUGGGCGCCGC | 3047 | GCGGCGCCCACGGAGUCCA |
| siRNA 997 | 997 | GGACUCCGUGGGCGCCGCG | 3048 | CGCGGCGCCCACGGAGUCC |
| siRNA 998 | 998 | GACUCCGUGGGCGCCGCGG | 3049 | CCGCGGCGCCCACGGAGUC |
| siRNA 999 | 999 | ACUCCGUGGGCGCCGCGGC | 3050 | GCCGCGGCGCCCACGGAGU |
| siRNA 1000 | 1000 | CUCCGUGGGCGCCGCGGCC | 3051 | GGCCGCGGCGCCCACGGAG |
| siRNA 1001 | 1001 | UCCGUGGGCGCCGCGGCCC | 3052 | GGGCCGCGGCGCCCACGGA |
| siRNA 1002 | 1002 | CCGUGGGCGCCGCGGCCCU | 3053 | AGGGCCGCGGCGCCCACGG |
| siRNA 1003 | 1003 | CGUGGGCGCCGCGGCCCUG | 3054 | CAGGGCCGCGGCGCCCACG |
| siRNA 1004 | 1004 | GUGGGCGCCGCGGCCCUGC | 3055 | GCAGGGCCGCGGCGCCCAC |
| siRNA 1005 | 1005 | UGGGCGCCGCGGCCCUGCU | 3056 | AGCAGGGCCGCGGCGCCCA |
| siRNA 1006 | 1006 | GGGCGCCGCGGCCCUGCUG | 3057 | CAGCAGGGCCGCGGCGCCC |
| siRNA 1007 | 1007 | GGCGCCGCGGCCCUGCUGG | 3058 | CCAGCAGGGCCGCGGCGCC |
| siRNA 1008 | 1008 | GCGCCGCGGCCCUGCUGGG | 3059 | CCCAGCAGGGCCGCGGCGC |
| siRNA 1009 | 1009 | CGCCGCGGCCCUGCUGGGC | 3060 | GCCCAGCAGGGCCGCGGCG |
| siRNA 1010 | 1010 | GCCGCGGCCCUGCUGGGCC | 3061 | GGCCCAGCAGGGCCGCGGC |
| siRNA 1011 | 1011 | CCGCGGCCCUGCUGGGCCU | 3062 | AGGCCCAGCAGGGCCGCGG |
| siRNA 1012 | 1012 | CGCGGCCCUGCUGGGCCUG | 3063 | CAGGCCCAGCAGGGCCGCG |
| siRNA 1013 | 1013 | GCGGCCCUGCUGGGCCUGG | 3064 | CCAGGCCCAGCAGGGCCGC |
| siRNA 1014 | 1014 | CGGCCCUGCUGGGCCUGGG | 3065 | CCCAGGCCCAGCAGGGCCG |
| siRNA 1015 | 1015 | GGCCCUGCUGGGCCUGGGC | 3066 | GCCCAGGCCCAGCAGGGCC |
| siRNA 1016 | 1016 | GCCCUGCUGGGCCUGGGCC | 3067 | GGCCCAGGCCCAGCAGGGC |
| siRNA 1017 | 1017 | CCCUGCUGGGCCUGGGCCC | 3068 | GGGCCCAGGCCCAGCAGGG |
| siRNA 1018 | 1018 | CCUGCUGGGCCUGGGCCCC | 3069 | GGGGCCCAGGCCCAGCAGG |
| siRNA 1019 | 1019 | CUGCUGGGCCUGGGCCCCC | 3070 | GGGGGCCCAGGCCCAGCAG |
| siRNA 1020 | 1020 | UGCUGGGCCUGGGCCCCCA | 3071 | UGGGGGCCCAGGCCCAGCA |
| siRNA 1021 | 1021 | GCUGGGCCUGGGCCCCCAU | 3072 | AUGGGGGCCCAGGCCCAGC |
| siRNA 1022 | 1022 | CUGGGCCUGGGCCCCCAUG | 3073 | CAUGGGGGCCCAGGCCCAG |
| siRNA 1023 | 1023 | UGGGCCUGGGCCCCCAUGC | 3074 | GCAUGGGGGCCCAGGCCCA |
| siRNA 1024 | 1024 | GGGCCUGGGCCCCCAUGCC | 3075 | GGCAUGGGGGCCCAGGCCC |
| siRNA 1025 | 1025 | GGCCUGGGCCCCCAUGCCU | 3076 | AGGCAUGGGGGCCCAGGCC |
| siRNA 1026 | 1026 | GCCUGGGCCCCCAUGCCUA | 3077 | UAGGCAUGGGGGCCCAGGC |
| siRNA 1027 | 1027 | CCUGGGCCCCCAUGCCUAC | 3078 | GUAGGCAUGGGGGCCCAGG |
| siRNA 1028 | 1028 | CUGGGCCCCCAUGCCUACU | 3079 | AGUAGGCAUGGGGGCCCAG |
| siRNA 1029 | 1029 | UGGGCCCCCAUGCCUACUG | 3080 | CAGUAGGCAUGGGGGCCCA |
| siRNA 1030 | 1030 | GGGCCCCCAUGCCUACUGC | 3081 | GCAGUAGGCAUGGGGGCCC |
| siRNA 1031 | 1031 | GGCCCCCAUGCCUACUGCC | 3082 | GGCAGUAGGCAUGGGGGCC |
| siRNA 1032 | 1032 | GCCCCCAUGCCUACUGCCG | 3083 | CGGCAGUAGGCAUGGGGGC |
| siRNA 1033 | 1033 | CCCCCAUGCCUACUGCCGG | 3084 | CCGGCAGUAGGCAUGGGGG |
| siRNA 1034 | 1034 | CCCCAUGCCUACUGCCGGA | 3085 | UCCGGCAGUAGGCAUGGGG |
| siRNA 1035 | 1035 | CCCAUGCCUACUGCCGGAA | 3086 | UUCCGGCAGUAGGCAUGGG |
| siRNA 1036 | 1036 | CCAUGCCUACUGCCGGAAU | 3087 | AUUCCGGCAGUAGGCAUGG |
| siRNA 1037 | 1037 | CAUGCCUACUGCCGGAAUC | 3088 | GAUUCCGGCAGUAGGCAUG |
| siRNA 1038 | 1038 | AUGCCUACUGCCGGAAUCC | 3089 | GGAUUCCGGCAGUAGGCAU |
| SiRNA 1039 | 1039 | UGCCUACUGCCGGAAUCCG | 3090 | CGGAUUCCGGCAGUAGGCA |
| siRNA 1040 | 1040 | GCCUACUGCCGGAAUCCGG | 3091 | CCGGAUUCCGGCAGUAGGC |
| siRNA 1041 | 1041 | CCUACUGCCGGAAUCCGGA | 3092 | UCCGGAUUCCGGCAGUAGG |
| siRNA 1042 | 1042 | CUACUGCCGGAAUCCGGAC | 3093 | GUCCGGAUUCCGGCAGUAG |
| siRNA 1043 | 1043 | UACUGCCGGAAUCCGGACA | 3094 | UGUCCGGAUUCCGGCAGUA |
| siRNA 1044 | 1044 | ACUGCCGGAAUCCGGACAA | 3095 | UUGUCCGGAUUCCGGCAGU |
| siRNA 1045 | 1045 | CUGCCGGAAUCCGGACAAU | 3096 | AUUGUCCGGAUUCCGGCAG |
| siRNA 1046 | 1046 | UGCCGGAAUCCGGACAAUG | 3097 | CAUUGUCCGGAUUCCGGCA |
| siRNA 1047 | 1047 | GCCGGAAUCCGGACAAUGA | 3098 | UCAUUGUCCGGAUUCCGGC |
| siRNA 1048 | 1048 | CCGGAAUCCGGACAAUGAC | 3099 | GUCAUUGUCCGGAUUCCGG |
| siRNA 1049 | 1049 | CGGAAUCCGGACAAUGACG | 3100 | CGUCAUUGUCCGGAUUCCG |
| siRNA 1050 | 1050 | GGAAUCCGGACAAUGACGA | 3101 | UCGUCAUUGUCCGGAUUCC |
| siRNA 1051 | 1051 | GAAUCCGGACAAUGACGAG | 3102 | CUCGUCAUUGUCCGGAUUC |
| siRNA 1052 | 1052 | AAUCCGGACAAUGACGAGA | 3103 | UCUCGUCAUUGUCCGGAUU |
| siRNA 1053 | 1053 | AUCCGGACAAUGACGAGAG | 3104 | CUCUCGUCAUUGUCCGGAU |
| siRNA 1054 | 1054 | UCCGGACAAUGACGAGAGG | 3105 | CCUCUCGUCAUUGUCCGGA |
| siRNA 1055 | 1055 | CCGGACAAUGACGAGAGGC | 3106 | GCCUCUCGUCAUUGUCCGG |
| siRNA 1056 | 1056 | CGGACAAUGACGAGAGGCC | 3107 | GGCCUCUCGUCAUUGUCCG |
| siRNA 1057 | 1057 | GGACAAUGACGAGAGGCCC | 3108 | GGGCCUCUCGUCAUUGUCC |
| siRNA 1058 | 1058 | GACAAUGACGAGAGGCCCU | 3109 | AGGGCCUCUCGUCAUUGUC |
| siRNA 1059 | 1059 | ACAAUGACGAGAGGCCCUG | 3110 | CAGGGCCUCUCGUCAUUGU |
| siRNA 1060 | 1060 | CAAUGACGAGAGGCCCUGG | 3111 | CCAGGGCCUCUCGUCAUUG |
| siRNA 1061 | 1061 | AAUGACGAGAGGCCCUGGU | 3112 | ACCAGGGCCUCUCGUCAUU |
| siRNA 1062 | 1062 | AUGACGAGAGGCCCUGGUG | 3113 | CACCAGGGCCUCUCGUCAU |
| siRNA 1063 | 1063 | UGACGAGAGGCCCUGGUGC | 3114 | GCACCAGGGCCUCUCGUCA |
| siRNA 1064 | 1064 | GACGAGAGGCCCUGGUGCU | 3115 | AGCACCAGGGCCUCUCGUC |
| siRNA 1065 | 1065 | ACGAGAGGCCCUGGUGCUA | 3116 | UAGCACCAGGGCCUCUCGU |
| siRNA 1066 | 1066 | CGAGAGGCCCUGGUGCUAC | 3117 | GUAGCACCAGGGCCUCUCG |
| siRNA 1067 | 1067 | GAGAGGCCCUGGUGCUACG | 3118 | CGUAGCACCAGGGCCUCUC |
| siRNA 1068 | 1068 | AGAGGCCCUGGUGCUACGU | 3119 | ACGUAGCACCAGGGCCUCU |
| siRNA 1069 | 1069 | GAGGCCCUGGUGCUACGUG | 3120 | CACGUAGCACCAGGGCCUC |
| siRNA 1070 | 1070 | AGGCCCUGGUGCUACGUGG | 3121 | CCACGUAGCACCAGGGCCU |
| siRNA 1071 | 1071 | GGCCCUGGUGCUACGUGGU | 3122 | ACCACGUAGCACCAGGGCC |
| SiRNA 1072 | 1072 | GCCCUGGUGCUACGUGGUG | 3123 | CACCACGUAGCACCAGGGC |
| siRNA 1073 | 1073 | CCCUGGUGCUACGUGGUGA | 3124 | UCACCACGUAGCACCAGGG |
| siRNA 1074 | 1074 | CCUGGUGCUACGUGGUGAA | 3125 | UUCACCACGUAGCACCAGG |
| siRNA 1075 | 1075 | CUGGUGCUACGUGGUGAAG | 3126 | CUUCACCACGUAGCACCAG |
| siRNA 1076 | 1076 | UGGUGCUACGUGGUGAAGG | 3127 | CCUUCACCACGUAGCACCA |
| siRNA 1077 | 1077 | GGUGCUACGUGGUGAAGGA | 3128 | UCCUUCACCACGUAGCACC |
| siRNA 1078 | 1078 | GUGCUACGUGGUGAAGGAC | 3129 | GUCCUUCACCACGUAGCAC |
| SiRNA 1079 | 1079 | UGCUACGUGGUGAAGGACA | 3130 | UGUCCUUCACCACGUAGCA |
| siRNA 1080 | 1080 | GCUACGUGGUGAAGGACAG | 3131 | CUGUCCUUCACCACGUAGC |
| siRNA 1081 | 1081 | CUACGUGGUGAAGGACAGC | 3132 | GCUGUCCUUCACCACGUAG |
| siRNA 1082 | 1082 | UACGUGGUGAAGGACAGCG | 3133 | CGCUGUCCUUCACCACGUA |
| siRNA 1083 | 1083 | ACGUGGUGAAGGACAGCGC | 3134 | GCGCUGUCCUUCACCACGU |
| siRNA 1084 | 1084 | CGUGGUGAAGGACAGCGCG | 3135 | CGCGCUGUCCUUCACCACG |
| siRNA 1085 | 1085 | GUGGUGAAGGACAGCGCGC | 3136 | GCGCGCUGUCCUUCACCAC |
| siRNA 1086 | 1086 | UGGUGAAGGACAGCGCGCU | 3137 | AGCGCGCUGUCCUUCACCA |
| siRNA 1087 | 1087 | GGUGAAGGACAGCGCGCUC | 3138 | GAGCGCGCUGUCCUUCACC |
| siRNA 1088 | 1088 | GUGAAGGACAGCGCGCUCU | 3139 | AGAGCGCGCUGUCCUUCAC |
| siRNA 1089 | 1089 | UGAAGGACAGCGCGCUCUC | 3140 | GAGAGCGCGCUGUCCUUCA |
| siRNA 1090 | 1090 | GAAGGACAGCGCGCUCUCC | 3141 | GGAGAGCGCGCUGUCCUUC |
| siRNA 1091 | 1091 | AAGGACAGCGCGCUCUCCU | 3142 | AGGAGAGCGCGCUGUCCUU |
| siRNA 1092 | 1092 | AGGACAGCGCGCUCUCCUG | 3143 | CAGGAGAGCGCGCUGUCCU |
| siRNA 1093 | 1093 | GGACAGCGCGCUCUCCUGG | 3144 | CCAGGAGAGCGCGCUGUCC |
| siRNA 1094 | 1094 | GACAGCGCGCUCUCCUGGG | 3145 | CCCAGGAGAGCGCGCUGUC |
| siRNA 1095 | 1095 | ACAGCGCGCUCUCCUGGGA | 3146 | UCCCAGGAGAGCGCGCUGU |
| siRNA 1096 | 1096 | CAGCGCGCUCUCCUGGGAG | 3147 | CUCCCAGGAGAGCGCGCUG |
| siRNA 1097 | 1097 | AGCGCGCUCUCCUGGGAGU | 3148 | ACUCCCAGGAGAGCGCGCU |
| siRNA 1098 | 1098 | GCGCGCUCUCCUGGGAGUA | 3149 | UACUCCCAGGAGAGCGCGC |
| siRNA 1099 | 1099 | CGCGCUCUCCUGGGAGUAC | 3150 | GUACUCCCAGGAGAGCGCG |
| siRNA 1100 | 1100 | GCGCUCUCCUGGGAGUACU | 3151 | AGUACUCCCAGGAGAGCGC |
| siRNA 1101 | 1101 | CGCUCUCCUGGGAGUACUG | 3152 | CAGUACUCCCAGGAGAGCG |
| siRNA 1102 | 1102 | GCUCUCCUGGGAGUACUGC | 3153 | GCAGUACUCCCAGGAGAGC |
| siRNA 1103 | 1103 | CUCUCCUGGGAGUACUGCC | 3154 | GGCAGUACUCCCAGGAGAG |
| siRNA 1104 | 1104 | UCUCCUGGGAGUACUGCCG | 3155 | CGGCAGUACUCCCAGGAGA |
| siRNA 1105 | 1105 | CUCCUGGGAGUACUGCCGC | 3156 | GCGGCAGUACUCCCAGGAG |
| siRNA 1106 | 1106 | UCCUGGGAGUACUGCCGCC | 3157 | GGCGGCAGUACUCCCAGGA |
| siRNA 1107 | 1107 | CCUGGGAGUACUGCCGCCU | 3158 | AGGCGGCAGUACUCCCAGG |
| siRNA 1108 | 1108 | CUGGGAGUACUGCCGCCUG | 3159 | CAGGCGGCAGUACUCCCAG |
| siRNA 1109 | 1109 | UGGGAGUACUGCCGCCUGG | 3160 | CCAGGCGGCAGUACUCCCA |
| siRNA 1110 | 1110 | GGGAGUACUGCCGCCUGGA | 3161 | UCCAGGCGGCAGUACUCCC |
| siRNA 1111 | 1111 | GGAGUACUGCCGCCUGGAG | 3162 | CUCCAGGCGGCAGUACUCC |
| siRNA 1112 | 1112 | GAGUACUGCCGCCUGGAGG | 3163 | CCUCCAGGCGGCAGUACUC |
| siRNA 1113 | 1113 | AGUACUGCCGCCUGGAGGC | 3164 | GCCUCCAGGCGGCAGUACU |
| SiRNA 1114 | 1114 | GUACUGCCGCCUGGAGGCC | 3165 | GGCCUCCAGGCGGCAGUAC |
| siRNA 1115 | 1115 | UACUGCCGCCUGGAGGCCU | 3166 | AGGCCUCCAGGCGGCAGUA |
| siRNA 1116 | 1116 | ACUGCCGCCUGGAGGCCUG | 3167 | CAGGCCUCCAGGCGGCAGU |
| siRNA 1117 | 1117 | CUGCCGCCUGGAGGCCUGC | 3168 | GCAGGCCUCCAGGCGGCAG |
| siRNA 1118 | 1118 | UGCCGCCUGGAGGCCUGCG | 3169 | CGCAGGCCUCCAGGCGGCA |
| siRNA 1119 | 1119 | GCCGCCUGGAGGCCUGCGA | 3170 | UCGCAGGCCUCCAGGCGGC |
| siRNA 1120 | 1120 | CCGCCUGGAGGCCUGCGAA | 3171 | UUCGCAGGCCUCCAGGCGG |
| siRNA 1121 | 1121 | CGCCUGGAGGCCUGCGAAU | 3172 | AUUCGCAGGCCUCCAGGCG |
| siRNA 1122 | 1122 | GCCUGGAGGCCUGCGAAUC | 3173 | GAUUCGCAGGCCUCCAGGC |
| siRNA 1123 | 1123 | CCUGGAGGCCUGCGAAUCC | 3174 | GGAUUCGCAGGCCUCCAGG |
| siRNA 1124 | 1124 | CUGGAGGCCUGCGAAUCCC | 3175 | GGGAUUCGCAGGCCUCCAG |
| siRNA 1125 | 1125 | UGGAGGCCUGCGAAUCCCU | 3176 | AGGGAUUCGCAGGCCUCCA |
| siRNA 1126 | 1126 | GGAGGCCUGCGAAUCCCUC | 3177 | GAGGGAUUCGCAGGCCUCC |
| siRNA 1127 | 1127 | GAGGCCUGCGAAUCCCUCA | 3178 | UGAGGGAUUCGCAGGCCUC |
| siRNA 1128 | 1128 | AGGCCUGCGAAUCCCUCAC | 3179 | GUGAGGGAUUCGCAGGCCU |
| siRNA 1129 | 1129 | GGCCUGCGAAUCCCUCACC | 3180 | GGUGAGGGAUUCGCAGGCC |
| siRNA 1130 | 1130 | GCCUGCGAAUCCCUCACCA | 3181 | UGGUGAGGGAUUCGCAGGC |
| siRNA 1131 | 1131 | CCUGCGAAUCCCUCACCAG | 3182 | CUGGUGAGGGAUUCGCAGG |
| siRNA 1132 | 1132 | CUGCGAAUCCCUCACCAGA | 3183 | UCUGGUGAGGGAUUCGCAG |
| siRNA 1133 | 1133 | UGCGAAUCCCUCACCAGAG | 3184 | CUCUGGUGAGGGAUUCGCA |
| siRNA 1134 | 1134 | GCGAAUCCCUCACCAGAGU | 3185 | ACUCUGGUGAGGGAUUCGC |
| siRNA 1135 | 1135 | CGAAUCCCUCACCAGAGUC | 3186 | GACUCUGGUGAGGGAUUCG |
| siRNA 1136 | 1136 | GAAUCCCUCACCAGAGUCC | 3187 | GGACUCUGGUGAGGGAUUC |
| siRNA 1137 | 1137 | AAUCCCUCACCAGAGUCCA | 3188 | UGGACUCUGGUGAGGGAUU |
| siRNA 1138 | 1138 | AUCCCUCACCAGAGUCCAA | 3189 | UUGGACUCUGGUGAGGGAU |
| siRNA 1139 | 1139 | UCCCUCACCAGAGUCCAAC | 3190 | GUUGGACUCUGGUGAGGGA |
| siRNA 1140 | 1140 | CCCUCACCAGAGUCCAACU | 3191 | AGUUGGACUCUGGUGAGGG |
| siRNA 1141 | 1141 | CCUCACCAGAGUCCAACUG | 3192 | CAGUUGGACUCUGGUGAGG |
| siRNA 1142 | 1142 | CUCACCAGAGUCCAACUGU | 3193 | ACAGUUGGACUCUGGUGAG |
| SiRNA 1143 | 1143 | UCACCAGAGUCCAACUGUC | 3194 | GACAGUUGGACUCUGGUGA |
| siRNA 1144 | 1144 | CACCAGAGUCCAACUGUCA | 3195 | UGACAGUUGGACUCUGGUG |
| siRNA 1145 | 1145 | ACCAGAGUCCAACUGUCAC | 3196 | GUGACAGUUGGACUCUGGU |
| siRNA 1146 | 1146 | CCAGAGUCCAACUGUCACC | 3197 | GGUGACAGUUGGACUCUGG |
| siRNA 1147 | 1147 | CAGAGUCCAACUGUCACCG | 3198 | CGGUGACAGUUGGACUCUG |
| siRNA 1148 | 1148 | AGAGUCCAACUGUCACCGG | 3199 | CCGGUGACAGUUGGACUCU |
| SiRNA 1149 | 1149 | GAGUCCAACUGUCACCGGA | 3200 | UCCGGUGACAGUUGGACUC |
| siRNA 1150 | 1150 | AGUCCAACUGUCACCGGAU | 3201 | AUCCGGUGACAGUUGGACU |
| siRNA 1151 | 1151 | GUCCAACUGUCACCGGAUC | 3202 | GAUCCGGUGACAGUUGGAC |
| siRNA 1152 | 1152 | UCCAACUGUCACCGGAUCU | 3203 | AGAUCCGGUGACAGUUGGA |
| siRNA 1153 | 1153 | CCAACUGUCACCGGAUCUC | 3204 | GAGAUCCGGUGACAGUUGG |
| siRNA 1154 | 1154 | CAACUGUCACCGGAUCUCC | 3205 | GGAGAUCCGGUGACAGUUG |
| siRNA 1155 | 1155 | AACUGUCACCGGAUCUCCU | 3206 | AGGAGAUCCGGUGACAGUU |
| siRNA 1156 | 1156 | ACUGUCACCGGAUCUCCUG | 3207 | CAGGAGAUCCGGUGACAGU |
| siRNA 1157 | 1157 | CUGUCACCGGAUCUCCUGG | 3208 | CCAGGAGAUCCGGUGACAG |
| siRNA 1158 | 1158 | UGUCACCGGAUCUCCUGGC | 3209 | GCCAGGAGAUCCGGUGACA |
| siRNA 1159 | 1159 | GUCACCGGAUCUCCUGGCG | 3210 | CGCCAGGAGAUCCGGUGAC |
| siRNA 1160 | 1160 | UCACCGGAUCUCCUGGCGA | 3211 | UCGCCAGGAGAUCCGGUGA |
| siRNA 1161 | 1161 | CACCGGAUCUCCUGGCGAC | 3212 | GUCGCCAGGAGAUCCGGUG |
| siRNA 1162 | 1162 | ACCGGAUCUCCUGGCGACC | 3213 | GGUCGCCAGGAGAUCCGGU |
| siRNA 1163 | 1163 | CCGGAUCUCCUGGCGACCC | 3214 | GGGUCGCCAGGAGAUCCGG |
| siRNA 1164 | 1164 | CGGAUCUCCUGGCGACCCU | 3215 | AGGGUCGCCAGGAGAUCCG |
| siRNA 1165 | 1165 | GGAUCUCCUGGCGACCCUG | 3216 | CAGGGUCGCCAGGAGAUCC |
| siRNA 1166 | 1166 | GAUCUCCUGGCGACCCUGC | 3217 | GCAGGGUCGCCAGGAGAUC |
| siRNA 1167 | 1167 | AUCUCCUGGCGACCCUGCC | 3218 | GGCAGGGUCGCCAGGAGAU |
| siRNA 1168 | 1168 | UCUCCUGGCGACCCUGCCU | 3219 | AGGCAGGGUCGCCAGGAGA |
| siRNA 1169 | 1169 | CUCCUGGCGACCCUGCCUG | 3220 | CAGGCAGGGUCGCCAGGAG |
| siRNA 1170 | 1170 | UCCUGGCGACCCUGCCUGA | 3221 | UCAGGCAGGGUCGCCAGGA |
| siRNA 1171 | 1171 | CCUGGCGACCCUGCCUGAG | 3222 | CUCAGGCAGGGUCGCCAGG |
| siRNA 1172 | 1172 | CUGGCGACCCUGCCUGAGC | 3223 | GCUCAGGCAGGGUCGCCAG |
| siRNA 1173 | 1173 | UGGCGACCCUGCCUGAGCC | 3224 | GGCUCAGGCAGGGUCGCCA |
| siRNA 1174 | 1174 | GGCGACCCUGCCUGAGCCA | 3225 | UGGCUCAGGCAGGGUCGCC |
| siRNA 1175 | 1175 | GCGACCCUGCCUGAGCCAG | 3226 | CUGGCUCAGGCAGGGUCGC |
| siRNA 1176 | 1176 | CGACCCUGCCUGAGCCAGC | 3227 | GCUGGCUCAGGCAGGGUCG |
| siRNA 1177 | 1177 | GACCCUGCCUGAGCCAGCC | 3228 | GGCUGGCUCAGGCAGGGUC |
| siRNA 1178 | 1178 | ACCCUGCCUGAGCCAGCCU | 3229 | AGGCUGGCUCAGGCAGGGU |
| siRNA 1179 | 1179 | CCCUGCCUGAGCCAGCCUC | 3230 | GAGGCUGGCUCAGGCAGGG |
| siRNA 1180 | 1180 | CCUGCCUGAGCCAGCCUCC | 3231 | GGAGGCUGGCUCAGGCAGG |
| siRNA 1181 | 1181 | CUGCCUGAGCCAGCCUCCC | 3232 | GGGAGGCUGGCUCAGGCAG |
| siRNA 1182 | 1182 | UGCCUGAGCCAGCCUCCCC | 3233 | GGGGAGGCUGGCUCAGGCA |
| siRNA 1183 | 1183 | GCCUGAGCCAGCCUCCCCG | 3234 | CGGGGAGGCUGGCUCAGGC |
| siRNA 1184 | 1184 | CCUGAGCCAGCCUCCCCGG | 3235 | CCGGGGAGGCUGGCUCAGG |
| siRNA 1185 | 1185 | CUGAGCCAGCCUCCCCGGG | 3236 | CCCGGGGAGGCUGGCUCAG |
| siRNA 1186 | 1186 | UGAGCCAGCCUCCCCGGGG | 3237 | CCCCGGGGAGGCUGGCUCA |
| siRNA 1187 | 1187 | GAGCCAGCCUCCCCGGGGC | 3238 | GCCCCGGGGAGGCUGGCUC |
| siRNA 1188 | 1188 | AGCCAGCCUCCCCGGGGCG | 3239 | CGCCCCGGGGAGGCUGGCU |
| siRNA 1189 | 1189 | GCCAGCCUCCCCGGGGCGC | 3240 | GCGCCCCGGGGAGGCUGGC |
| siRNA 1190 | 1190 | CCAGCCUCCCCGGGGCGCC | 3241 | GGCGCCCCGGGGAGGCUGG |
| siRNA 1191 | 1191 | CAGCCUCCCCGGGGCGCCA | 3242 | UGGCGCCCCGGGGAGGCUG |
| siRNA 1192 | 1192 | AGCCUCCCCGGGGCGCCAG | 3243 | CUGGCGCCCCGGGGAGGCU |
| siRNA 1193 | 1193 | GCCUCCCCGGGGCGCCAGG | 3244 | CCUGGCGCCCCGGGGAGGC |
| siRNA 1194 | 1194 | CCUCCCCGGGGCGCCAGGC | 3245 | GCCUGGCGCCCCGGGGAGG |
| siRNA 1195 | 1195 | CUCCCCGGGGCGCCAGGCC | 3246 | GGCCUGGCGCCCCGGGGAG |
| siRNA 1196 | 1196 | UCCCCGGGGCGCCAGGCCU | 3247 | AGGCCUGGCGCCCCGGGGA |
| siRNA 1197 | 1197 | CCCCGGGGCGCCAGGCCUG | 3248 | CAGGCCUGGCGCCCCGGGG |
| siRNA 1198 | 1198 | CCCGGGGCGCCAGGCCUGC | 3249 | GCAGGCCUGGCGCCCCGGG |
| siRNA 1199 | 1199 | CCGGGGCGCCAGGCCUGCG | 3250 | CGCAGGCCUGGCGCCCCGG |
| siRNA 1200 | 1200 | CGGGGCGCCAGGCCUGCGG | 3251 | CCGCAGGCCUGGCGCCCCG |
| siRNA 1201 | 1201 | GGGGCGCCAGGCCUGCGGC | 3252 | GCCGCAGGCCUGGCGCCCC |
| siRNA 1202 | 1202 | GGGCGCCAGGCCUGCGGCA | 3253 | UGCCGCAGGCCUGGCGCCC |
| siRNA 1203 | 1203 | GGCGCCAGGCCUGCGGCAG | 3254 | CUGCCGCAGGCCUGGCGCC |
| siRNA 1204 | 1204 | GCGCCAGGCCUGCGGCAGG | 3255 | CCUGCCGCAGGCCUGGCGC |
| siRNA 1205 | 1205 | CGCCAGGCCUGCGGCAGGA | 3256 | UCCUGCCGCAGGCCUGGCG |
| siRNA 1206 | 1206 | GCCAGGCCUGCGGCAGGAG | 3257 | CUCCUGCCGCAGGCCUGGC |
| siRNA 1207 | 1207 | CCAGGCCUGCGGCAGGAGG | 3258 | CCUCCUGCCGCAGGCCUGG |
| siRNA 1208 | 1208 | CAGGCCUGCGGCAGGAGGC | 3259 | GCCUCCUGCCGCAGGCCUG |
| siRNA 1209 | 1209 | AGGCCUGCGGCAGGAGGCA | 3260 | UGCCUCCUGCCGCAGGCCU |
| siRNA 1210 | 1210 | GGCCUGCGGCAGGAGGCAC | 3261 | GUGCCUCCUGCCGCAGGCC |
| siRNA 1211 | 1211 | GCCUGCGGCAGGAGGCACA | 3262 | UGUGCCUCCUGCCGCAGGC |
| siRNA 1212 | 1212 | CCUGCGGCAGGAGGCACAA | 3263 | UUGUGCCUCCUGCCGCAGG |
| siRNA 1213 | 1213 | CUGCGGCAGGAGGCACAAG | 3264 | CUUGUGCCUCCUGCCGCAG |
| siRNA 1214 | 1214 | UGCGGCAGGAGGCACAAGA | 3265 | UCUUGUGCCUCCUGCCGCA |
| siRNA 1215 | 1215 | GCGGCAGGAGGCACAAGAA | 3266 | UUCUUGUGCCUCCUGCCGC |
| siRNA 1216 | 1216 | CGGCAGGAGGCACAAGAAG | 3267 | CUUCUUGUGCCUCCUGCCG |
| siRNA 1217 | 1217 | GGCAGGAGGCACAAGAAGA | 3268 | UCUUCUUGUGCCUCCUGCC |
| siRNA 1218 | 1218 | GCAGGAGGCACAAGAAGAG | 3269 | CUCUUCUUGUGCCUCCUGC |
| siRNA 1219 | 1219 | CAGGAGGCACAAGAAGAGG | 3270 | CCUCUUCUUGUGCCUCCUG |
| siRNA 1220 | 1220 | AGGAGGCACAAGAAGAGGA | 3271 | UCCUCUUCUUGUGCCUCCU |
| siRNA 1221 | 1221 | GGAGGCACAAGAAGAGGAC | 3272 | GUCCUCUUCUUGUGCCUCC |
| siRNA 1222 | 1222 | GAGGCACAAGAAGAGGACG | 3273 | CGUCCUCUUCUUGUGCCUC |
| siRNA 1223 | 1223 | AGGCACAAGAAGAGGACGU | 3274 | ACGUCCUCUUCUUGUGCCU |
| siRNA 1224 | 1224 | GGCACAAGAAGAGGACGUU | 3275 | AACGUCCUCUUCUUGUGCC |
| siRNA 1225 | 1225 | GCACAAGAAGAGGACGUUC | 3276 | GAACGUCCUCUUCUUGUGC |
| siRNA 1226 | 1226 | CACAAGAAGAGGACGUUCC | 3277 | GGAACGUCCUCUUCUUGUG |
| siRNA 1227 | 1227 | ACAAGAAGAGGACGUUCCU | 3278 | AGGAACGUCCUCUUCUUGU |
| siRNA 1228 | 1228 | CAAGAAGAGGACGUUCCUG | 3279 | CAGGAACGUCCUCUUCUUG |
| siRNA 1229 | 1229 | AAGAAGAGGACGUUCCUGC | 3280 | GCAGGAACGUCCUCUUCUU |
| siRNA 1230 | 1230 | AGAAGAGGACGUUCCUGCG | 3281 | CGCAGGAACGUCCUCUUCU |
| siRNA 1231 | 1231 | GAAGAGGACGUUCCUGCGG | 3282 | CCGCAGGAACGUCCUCUUC |
| siRNA 1232 | 1232 | AAGAGGACGUUCCUGCGGC | 3283 | GCCGCAGGAACGUCCUCUU |
| siRNA 1233 | 1233 | AGAGGACGUUCCUGCGGCC | 3284 | GGCCGCAGGAACGUCCUCU |
| siRNA 1234 | 1234 | GAGGACGUUCCUGCGGCCA | 3285 | UGGCCGCAGGAACGUCCUC |
| siRNA 1235 | 1235 | AGGACGUUCCUGCGGCCAC | 3286 | GUGGCCGCAGGAACGUCCU |
| siRNA 1236 | 1236 | GGACGUUCCUGCGGCCACG | 3287 | CGUGGCCGCAGGAACGUCC |
| siRNA 1237 | 1237 | GACGUUCCUGCGGCCACGU | 3288 | ACGUGGCCGCAGGAACGUC |
| siRNA 1238 | 1238 | ACGUUCCUGCGGCCACGUA | 3289 | UACGUGGCCGCAGGAACGU |
| siRNA 1239 | 1239 | CGUUCCUGCGGCCACGUAU | 3290 | AUACGUGGCCGCAGGAACG |
| siRNA 1240 | 1240 | GUUCCUGCGGCCACGUAUC | 3291 | GAUACGUGGCCGCAGGAAC |
| SiRNA 1241 | 1241 | UUCCUGCGGCCACGUAUCA | 3292 | UGAUACGUGGCCGCAGGAA |
| siRNA 1242 | 1242 | UCCUGCGGCCACGUAUCAU | 3293 | AUGAUACGUGGCCGCAGGA |
| siRNA 1243 | 1243 | CCUGCGGCCACGUAUCAUC | 3294 | GAUGAUACGUGGCCGCAGG |
| siRNA 1244 | 1244 | CUGCGGCCACGUAUCAUCG | 3295 | CGAUGAUACGUGGCCGCAG |
| siRNA 1245 | 1245 | UGCGGCCACGUAUCAUCGG | 3296 | CCGAUGAUACGUGGCCGCA |
| siRNA 1246 | 1246 | GCGGCCACGUAUCAUCGGC | 3297 | GCCGAUGAUACGUGGCCGC |
| siRNA 1247 | 1247 | CGGCCACGUAUCAUCGGCG | 3298 | CGCCGAUGAUACGUGGCCG |
| siRNA 1248 | 1248 | GGCCACGUAUCAUCGGCGG | 3299 | CCGCCGAUGAUACGUGGCC |
| siRNA 1249 | 1249 | GCCACGUAUCAUCGGCGGC | 3300 | GCCGCCGAUGAUACGUGGC |
| siRNA 1250 | 1250 | CCACGUAUCAUCGGCGGCU | 3301 | AGCCGCCGAUGAUACGUGG |
| siRNA 1251 | 1251 | CACGUAUCAUCGGCGGCUC | 3302 | GAGCCGCCGAUGAUACGUG |
| siRNA 1252 | 1252 | ACGUAUCAUCGGCGGCUCC | 3303 | GGAGCCGCCGAUGAUACGU |
| siRNA 1253 | 1253 | CGUAUCAUCGGCGGCUCCU | 3304 | AGGAGCCGCCGAUGAUACG |
| siRNA 1254 | 1254 | GUAUCAUCGGCGGCUCCUC | 3305 | GAGGAGCCGCCGAUGAUAC |
| siRNA 1255 | 1255 | UAUCAUCGGCGGCUCCUCC | 3306 | GGAGGAGCCGCCGAUGAUA |
| siRNA 1256 | 1256 | AUCAUCGGCGGCUCCUCCU | 3307 | AGGAGGAGCCGCCGAUGAU |
| siRNA 1257 | 1257 | UCAUCGGCGGCUCCUCCUC | 3308 | GAGGAGGAGCCGCCGAUGA |
| siRNA 1258 | 1258 | CAUCGGCGGCUCCUCCUCG | 3309 | CGAGGAGGAGCCGCCGAUG |
| siRNA 1259 | 1259 | AUCGGCGGCUCCUCCUCGC | 3310 | GCGAGGAGGAGCCGCCGAU |
| siRNA 1260 | 1260 | UCGGCGGCUCCUCCUCGCU | 3311 | AGCGAGGAGGAGCCGCCGA |
| siRNA 1261 | 1261 | CGGCGGCUCCUCCUCGCUG | 3312 | CAGCGAGGAGGAGCCGCCG |
| siRNA 1262 | 1262 | GGCGGCUCCUCCUCGCUGC | 3313 | GCAGCGAGGAGGAGCCGCC |
| siRNA 1263 | 1263 | GCGGCUCCUCCUCGCUGCC | 3314 | GGCAGCGAGGAGGAGCCGC |
| siRNA 1264 | 1264 | CGGCUCCUCCUCGCUGCCC | 3315 | GGGCAGCGAGGAGGAGCCG |
| siRNA 1265 | 1265 | GGCUCCUCCUCGCUGCCCG | 3316 | CGGGCAGCGAGGAGGAGCC |
| siRNA 1266 | 1266 | GCUCCUCCUCGCUGCCCGG | 3317 | CCGGGCAGCGAGGAGGAGC |
| siRNA 1267 | 1267 | CUCCUCCUCGCUGCCCGGC | 3318 | GCCGGGCAGCGAGGAGGAG |
| siRNA 1268 | 1268 | UCCUCCUCGCUGCCCGGCU | 3319 | AGCCGGGCAGCGAGGAGGA |
| siRNA 1269 | 1269 | CCUCCUCGCUGCCCGGCUC | 3320 | GAGCCGGGCAGCGAGGAGG |
| siRNA 1270 | 1270 | CUCCUCGCUGCCCGGCUCG | 3321 | CGAGCCGGGCAGCGAGGAG |
| siRNA 1271 | 1271 | UCCUCGCUGCCCGGCUCGC | 3322 | GCGAGCCGGGCAGCGAGGA |
| siRNA 1272 | 1272 | CCUCGCUGCCCGGCUCGCA | 3323 | UGCGAGCCGGGCAGCGAGG |
| siRNA 1273 | 1273 | CUCGCUGCCCGGCUCGCAC | 3324 | GUGCGAGCCGGGCAGCGAG |
| siRNA 1274 | 1274 | UCGCUGCCCGGCUCGCACC | 3325 | GGUGCGAGCCGGGCAGCGA |
| siRNA 1275 | 1275 | CGCUGCCCGGCUCGCACCC | 3326 | GGGUGCGAGCCGGGCAGCG |
| siRNA 1276 | 1276 | GCUGCCCGGCUCGCACCCC | 3327 | GGGGUGCGAGCCGGGCAGC |
| siRNA 1277 | 1277 | CUGCCCGGCUCGCACCCCU | 3328 | AGGGGUGCGAGCCGGGCAG |
| siRNA 1278 | 1278 | UGCCCGGCUCGCACCCCUG | 3329 | CAGGGGUGCGAGCCGGGCA |
| siRNA 1279 | 1279 | GCCCGGCUCGCACCCCUGG | 3330 | CCAGGGGUGCGAGCCGGGC |
| siRNA 1280 | 1280 | CCCGGCUCGCACCCCUGGC | 3331 | GCCAGGGGUGCGAGCCGGG |
| siRNA 1281 | 1281 | CCGGCUCGCACCCCUGGCU | 3332 | AGCCAGGGGUGCGAGCCGG |
| siRNA 1282 | 1282 | CGGCUCGCACCCCUGGCUG | 3333 | CAGCCAGGGGUGCGAGCCG |
| siRNA 1283 | 1283 | GGCUCGCACCCCUGGCUGG | 3334 | CCAGCCAGGGGUGCGAGCC |
| siRNA 1284 | 1284 | GCUCGCACCCCUGGCUGGC | 3335 | GCCAGCCAGGGGUGCGAGC |
| siRNA 1285 | 1285 | CUCGCACCCCUGGCUGGCC | 3336 | GGCCAGCCAGGGGUGCGAG |
| siRNA 1286 | 1286 | UCGCACCCCUGGCUGGCCG | 3337 | CGGCCAGCCAGGGGUGCGA |
| siRNA 1287 | 1287 | CGCACCCCUGGCUGGCCGC | 3338 | GCGGCCAGCCAGGGGUGCG |
| siRNA 1288 | 1288 | GCACCCCUGGCUGGCCGCC | 3339 | GGCGGCCAGCCAGGGGUGC |
| siRNA 1289 | 1289 | CACCCCUGGCUGGCCGCCA | 3340 | UGGCGGCCAGCCAGGGGUG |
| siRNA 1290 | 1290 | ACCCCUGGCUGGCCGCCAU | 3341 | AUGGCGGCCAGCCAGGGGU |
| siRNA 1291 | 1291 | CCCCUGGCUGGCCGCCAUC | 3342 | GAUGGCGGCCAGCCAGGGG |
| siRNA 1292 | 1292 | CCCUGGCUGGCCGCCAUCU | 3343 | AGAUGGCGGCCAGCCAGGG |
| siRNA 1293 | 1293 | CCUGGCUGGCCGCCAUCUA | 3344 | UAGAUGGCGGCCAGCCAGG |
| siRNA 1294 | 1294 | CUGGCUGGCCGCCAUCUAC | 3345 | GUAGAUGGCGGCCAGCCAG |
| siRNA 1295 | 1295 | UGGCUGGCCGCCAUCUACA | 3346 | UGUAGAUGGCGGCCAGCCA |
| siRNA 1296 | 1296 | GGCUGGCCGCCAUCUACAU | 3347 | AUGUAGAUGGCGGCCAGCC |
| siRNA 1297 | 1297 | GCUGGCCGCCAUCUACAUC | 3348 | GAUGUAGAUGGCGGCCAGC |
| siRNA 1298 | 1298 | CUGGCCGCCAUCUACAUCG | 3349 | CGAUGUAGAUGGCGGCCAG |
| siRNA 1299 | 1299 | UGGCCGCCAUCUACAUCGG | 3350 | CCGAUGUAGAUGGCGGCCA |
| siRNA 1300 | 1300 | GGCCGCCAUCUACAUCGGG | 3351 | CCCGAUGUAGAUGGCGGCC |
| siRNA 1301 | 1301 | GCCGCCAUCUACAUCGGGG | 3352 | CCCCGAUGUAGAUGGCGGC |
| siRNA 1302 | 1302 | CCGCCAUCUACAUCGGGGA | 3353 | UCCCCGAUGUAGAUGGCGG |
| siRNA 1303 | 1303 | CGCCAUCUACAUCGGGGAC | 3354 | GUCCCCGAUGUAGAUGGCG |
| siRNA 1304 | 1304 | GCCAUCUACAUCGGGGACA | 3355 | UGUCCCCGAUGUAGAUGGC |
| siRNA 1305 | 1305 | CCAUCUACAUCGGGGACAG | 3356 | CUGUCCCCGAUGUAGAUGG |
| siRNA 1306 | 1306 | CAUCUACAUCGGGGACAGC | 3357 | GCUGUCCCCGAUGUAGAUG |
| siRNA 1307 | 1307 | AUCUACAUCGGGGACAGCU | 3358 | AGCUGUCCCCGAUGUAGAU |
| siRNA 1308 | 1308 | UCUACAUCGGGGACAGCUU | 3359 | AAGCUGUCCCCGAUGUAGA |
| siRNA 1309 | 1309 | CUACAUCGGGGACAGCUUC | 3360 | GAAGCUGUCCCCGAUGUAG |
| siRNA 1310 | 1310 | UACAUCGGGGACAGCUUCU | 3361 | AGAAGCUGUCCCCGAUGUA |
| siRNA 1311 | 1311 | ACAUCGGGGACAGCUUCUG | 3362 | CAGAAGCUGUCCCCGAUGU |
| siRNA 1312 | 1312 | CAUCGGGGACAGCUUCUGC | 3363 | GCAGAAGCUGUCCCCGAUG |
| siRNA 1313 | 1313 | AUCGGGGACAGCUUCUGCG | 3364 | CGCAGAAGCUGUCCCCGAU |
| siRNA 1314 | 1314 | UCGGGGACAGCUUCUGCGC | 3365 | GCGCAGAAGCUGUCCCCGA |
| siRNA 1315 | 1315 | CGGGGACAGCUUCUGCGCC | 3366 | GGCGCAGAAGCUGUCCCCG |
| siRNA 1316 | 1316 | GGGGACAGCUUCUGCGCCG | 3367 | CGGCGCAGAAGCUGUCCCC |
| siRNA 1317 | 1317 | GGGACAGCUUCUGCGCCGG | 3368 | CCGGCGCAGAAGCUGUCCC |
| siRNA 1318 | 1318 | GGACAGCUUCUGCGCCGGG | 3369 | CCCGGCGCAGAAGCUGUCC |
| siRNA 1319 | 1319 | GACAGCUUCUGCGCCGGGA | 3370 | UCCCGGCGCAGAAGCUGUC |
| siRNA 1320 | 1320 | ACAGCUUCUGCGCCGGGAG | 3371 | CUCCCGGCGCAGAAGCUGU |
| siRNA 1321 | 1321 | CAGCUUCUGCGCCGGGAGC | 3372 | GCUCCCGGCGCAGAAGCUG |
| siRNA 1322 | 1322 | AGCUUCUGCGCCGGGAGCC | 3373 | GGCUCCCGGCGCAGAAGCU |
| siRNA 1323 | 1323 | GCUUCUGCGCCGGGAGCCU | 3374 | AGGCUCCCGGCGCAGAAGC |
| siRNA 1324 | 1324 | CUUCUGCGCCGGGAGCCUG | 3375 | CAGGCUCCCGGCGCAGAAG |
| siRNA 1325 | 1325 | UUCUGCGCCGGGAGCCUGG | 3376 | CCAGGCUCCCGGCGCAGAA |
| siRNA 1326 | 1326 | UCUGCGCCGGGAGCCUGGU | 3377 | ACCAGGCUCCCGGCGCAGA |
| siRNA 1327 | 1327 | CUGCGCCGGGAGCCUGGUC | 3378 | GACCAGGCUCCCGGCGCAG |
| siRNA 1328 | 1328 | UGCGCCGGGAGCCUGGUCC | 3379 | GGACCAGGCUCCCGGCGCA |
| SiRNA 1329 | 1329 | GCGCCGGGAGCCUGGUCCA | 3380 | UGGACCAGGCUCCCGGCGC |
| siRNA 1330 | 1330 | CGCCGGGAGCCUGGUCCAC | 3381 | GUGGACCAGGCUCCCGGCG |
| siRNA 1331 | 1331 | GCCGGGAGCCUGGUCCACA | 3382 | UGUGGACCAGGCUCCCGGC |
| siRNA 1332 | 1332 | CCGGGAGCCUGGUCCACAC | 3383 | GUGUGGACCAGGCUCCCGG |
| siRNA 1333 | 1333 | CGGGAGCCUGGUCCACACC | 3384 | GGUGUGGACCAGGCUCCCG |
| siRNA 1334 | 1334 | GGGAGCCUGGUCCACACCU | 3385 | AGGUGUGGACCAGGCUCCC |
| siRNA 1335 | 1335 | GGAGCCUGGUCCACACCUG | 3386 | CAGGUGUGGACCAGGCUCC |
| siRNA 1336 | 1336 | GAGCCUGGUCCACACCUGC | 3387 | GCAGGUGUGGACCAGGCUC |
| siRNA 1337 | 1337 | AGCCUGGUCCACACCUGCU | 3388 | AGCAGGUGUGGACCAGGCU |
| siRNA 1338 | 1338 | GCCUGGUCCACACCUGCUG | 3389 | CAGCAGGUGUGGACCAGGC |
| siRNA 1339 | 1339 | CCUGGUCCACACCUGCUGG | 3390 | CCAGCAGGUGUGGACCAGG |
| SiRNA 1340 | 1340 | CUGGUCCACACCUGCUGGG | 3391 | CCCAGCAGGUGUGGACCAG |
| siRNA 1341 | 1341 | UGGUCCACACCUGCUGGGU | 3392 | ACCCAGCAGGUGUGGACCA |
| siRNA 1342 | 1342 | GGUCCACACCUGCUGGGUG | 3393 | CACCCAGCAGGUGUGGACC |
| siRNA 1343 | 1343 | GUCCACACCUGCUGGGUGG | 3394 | CCACCCAGCAGGUGUGGAC |
| SiRNA 1344 | 1344 | UCCACACCUGCUGGGUGGU | 3395 | ACCACCCAGCAGGUGUGGA |
| siRNA 1345 | 1345 | CCACACCUGCUGGGUGGUG | 3396 | CACCACCCAGCAGGUGUGG |
| siRNA 1346 | 1346 | CACACCUGCUGGGUGGUGU | 3397 | ACACCACCCAGCAGGUGUG |
| siRNA 1347 | 1347 | ACACCUGCUGGGUGGUGUC | 3398 | GACACCACCCAGCAGGUGU |
| siRNA 1348 | 1348 | CACCUGCUGGGUGGUGUCG | 3399 | CGACACCACCCAGCAGGUG |
| SiRNA 1349 | 1349 | ACCUGCUGGGUGGUGUCGG | 3400 | CCGACACCACCCAGCAGGU |
| siRNA 1350 | 1350 | CCUGCUGGGUGGUGUCGGC | 3401 | GCCGACACCACCCAGCAGG |
| siRNA 1351 | 1351 | CUGCUGGGUGGUGUCGGCC | 3402 | GGCCGACACCACCCAGCAG |
| siRNA 1352 | 1352 | UGCUGGGUGGUGUCGGCCG | 3403 | CGGCCGACACCACCCAGCA |
| siRNA 1353 | 1353 | GCUGGGUGGUGUCGGCCGC | 3404 | GCGGCCGACACCACCCAGC |
| siRNA 1354 | 1354 | CUGGGUGGUGUCGGCCGCC | 3405 | GGCGGCCGACACCACCCAG |
| siRNA 1355 | 1355 | UGGGUGGUGUCGGCCGCCC | 3406 | GGGCGGCCGACACCACCCA |
| siRNA 1356 | 1356 | GGGUGGUGUCGGCCGCCCA | 3407 | UGGGCGGCCGACACCACCC |
| siRNA 1357 | 1357 | GGUGGUGUCGGCCGCCCAC | 3408 | GUGGGCGGCCGACACCACC |
| siRNA 1358 | 1358 | GUGGUGUCGGCCGCCCACU | 3409 | AGUGGGCGGCCGACACCAC |
| siRNA 1359 | 1359 | UGGUGUCGGCCGCCCACUG | 3410 | CAGUGGGCGGCCGACACCA |
| siRNA 1360 | 1360 | GGUGUCGGCCGCCCACUGC | 3411 | GCAGUGGGCGGCCGACACC |
| siRNA 1361 | 1361 | GUGUCGGCCGCCCACUGCU | 3412 | AGCAGUGGGCGGCCGACAC |
| siRNA 1362 | 1362 | UGUCGGCCGCCCACUGCUU | 3413 | AAGCAGUGGGCGGCCGACA |
| siRNA 1363 | 1363 | GUCGGCCGCCCACUGCUUC | 3414 | GAAGCAGUGGGCGGCCGAC |
| siRNA 1364 | 1364 | UCGGCCGCCCACUGCUUCU | 3415 | AGAAGCAGUGGGCGGCCGA |
| siRNA 1365 | 1365 | CGGCCGCCCACUGCUUCUC | 3416 | GAGAAGCAGUGGGCGGCCG |
| siRNA 1366 | 1366 | GGCCGCCCACUGCUUCUCC | 3417 | GGAGAAGCAGUGGGCGGCC |
| siRNA 1367 | 1367 | GCCGCCCACUGCUUCUCCC | 3418 | GGGAGAAGCAGUGGGCGGC |
| siRNA 1368 | 1368 | CCGCCCACUGCUUCUCCCA | 3419 | UGGGAGAAGCAGUGGGCGG |
| siRNA 1369 | 1369 | CGCCCACUGCUUCUCCCAC | 3420 | GUGGGAGAAGCAGUGGGCG |
| siRNA 1370 | 1370 | GCCCACUGCUUCUCCCACA | 3421 | UGUGGGAGAAGCAGUGGGC |
| SiRNA 1371 | 1371 | CCCACUGCUUCUCCCACAG | 3422 | CUGUGGGAGAAGCAGUGGG |
| siRNA 1372 | 1372 | CCACUGCUUCUCCCACAGC | 3423 | GCUGUGGGAGAAGCAGUGG |
| siRNA 1373 | 1373 | CACUGCUUCUCCCACAGCC | 3424 | GGCUGUGGGAGAAGCAGUG |
| SiRNA 1374 | 1374 | ACUGCUUCUCCCACAGCCC | 3425 | GGGCUGUGGGAGAAGCAGU |
| siRNA 1375 | 1375 | CUGCUUCUCCCACAGCCCC | 3426 | GGGGCUGUGGGAGAAGCAG |
| siRNA 1376 | 1376 | UGCUUCUCCCACAGCCCCC | 3427 | GGGGGCUGUGGGAGAAGCA |
| siRNA 1377 | 1377 | GCUUCUCCCACAGCCCCCC | 3428 | GGGGGGCUGUGGGAGAAGC |
| siRNA 1378 | 1378 | CUUCUCCCACAGCCCCCCC | 3429 | GGGGGGGCUGUGGGAGAAG |
| siRNA 1379 | 1379 | UUCUCCCACAGCCCCCCCA | 3430 | UGGGGGGGCUGUGGGAGAA |
| siRNA 1380 | 1380 | UCUCCCACAGCCCCCCCAG | 3431 | CUGGGGGGGCUGUGGGAGA |
| siRNA 1381 | 1381 | CUCCCACAGCCCCCCCAGG | 3432 | CCUGGGGGGGCUGUGGGAG |
| siRNA 1382 | 1382 | UCCCACAGCCCCCCCAGGG | 3433 | CCCUGGGGGGGCUGUGGGA |
| siRNA 1383 | 1383 | CCCACAGCCCCCCCAGGGA | 3434 | UCCCUGGGGGGGCUGUGGG |
| siRNA 1384 | 1384 | CCACAGCCCCCCCAGGGAC | 3435 | GUCCCUGGGGGGGCUGUGG |
| siRNA 1385 | 1385 | CACAGCCCCCCCAGGGACA | 3436 | UGUCCCUGGGGGGGCUGUG |
| siRNA 1386 | 1386 | ACAGCCCCCCCAGGGACAG | 3437 | CUGUCCCUGGGGGGGCUGU |
| siRNA 1387 | 1387 | CAGCCCCCCCAGGGACAGC | 3438 | GCUGUCCCUGGGGGGGCUG |
| siRNA 1388 | 1388 | AGCCCCCCCAGGGACAGCG | 3439 | CGCUGUCCCUGGGGGGGCU |
| SiRNA 1389 | 1389 | GCCCCCCCAGGGACAGCGU | 3440 | ACGCUGUCCCUGGGGGGGC |
| siRNA 1390 | 1390 | CCCCCCCAGGGACAGCGUC | 3441 | GACGCUGUCCCUGGGGGGG |
| siRNA 1391 | 1391 | CCCCCCAGGGACAGCGUCU | 3442 | AGACGCUGUCCCUGGGGGG |
| siRNA 1392 | 1392 | CCCCCAGGGACAGCGUCUC | 3443 | GAGACGCUGUCCCUGGGGG |
| siRNA 1393 | 1393 | CCCCAGGGACAGCGUCUCC | 3444 | GGAGACGCUGUCCCUGGGG |
| siRNA 1394 | 1394 | CCCAGGGACAGCGUCUCCG | 3445 | CGGAGACGCUGUCCCUGGG |
| siRNA 1395 | 1395 | CCAGGGACAGCGUCUCCGU | 3446 | ACGGAGACGCUGUCCCUGG |
| siRNA 1396 | 1396 | CAGGGACAGCGUCUCCGUG | 3447 | CACGGAGACGCUGUCCCUG |
| siRNA 1397 | 1397 | AGGGACAGCGUCUCCGUGG | 3448 | CCACGGAGACGCUGUCCCU |
| siRNA 1398 | 1398 | GGGACAGCGUCUCCGUGGU | 3449 | ACCACGGAGACGCUGUCCC |
| SiRNA 1399 | 1399 | GGACAGCGUCUCCGUGGUG | 3450 | CACCACGGAGACGCUGUCC |
| siRNA 1400 | 1400 | GACAGCGUCUCCGUGGUGC | 3451 | GCACCACGGAGACGCUGUC |
| siRNA 1401 | 1401 | ACAGCGUCUCCGUGGUGCU | 3452 | AGCACCACGGAGACGCUGU |
| siRNA 1402 | 1402 | CAGCGUCUCCGUGGUGCUG | 3453 | CAGCACCACGGAGACGCUG |
| siRNA 1403 | 1403 | AGCGUCUCCGUGGUGCUGG | 3454 | CCAGCACCACGGAGACGCU |
| siRNA 1404 | 1404 | GCGUCUCCGUGGUGCUGGG | 3455 | CCCAGCACCACGGAGACGC |
| siRNA 1405 | 1405 | CGUCUCCGUGGUGCUGGGC | 3456 | GCCCAGCACCACGGAGACG |
| siRNA 1406 | 1406 | GUCUCCGUGGUGCUGGGCC | 3457 | GGCCCAGCACCACGGAGAC |
| siRNA 1407 | 1407 | UCUCCGUGGUGCUGGGCCA | 3458 | UGGCCCAGCACCACGGAGA |
| SiRNA 1408 | 1408 | CUCCGUGGUGCUGGGCCAG | 3459 | CUGGCCCAGCACCACGGAG |
| siRNA 1409 | 1409 | UCCGUGGUGCUGGGCCAGC | 3460 | GCUGGCCCAGCACCACGGA |
| siRNA 1410 | 1410 | CCGUGGUGCUGGGCCAGCA | 3461 | UGCUGGCCCAGCACCACGG |
| siRNA 1411 | 1411 | CGUGGUGCUGGGCCAGCAC | 3462 | GUGCUGGCCCAGCACCACG |
| siRNA 1412 | 1412 | GUGGUGCUGGGCCAGCACU | 3463 | AGUGCUGGCCCAGCACCAC |
| siRNA 1413 | 1413 | UGGUGCUGGGCCAGCACUU | 3464 | AAGUGCUGGCCCAGCACCA |
| SiRNA 1414 | 1414 | GGUGCUGGGCCAGCACUUC | 3465 | GAAGUGCUGGCCCAGCACC |
| siRNA 1415 | 1415 | GUGCUGGGCCAGCACUUCU | 3466 | AGAAGUGCUGGCCCAGCAC |
| siRNA 1416 | 1416 | UGCUGGGCCAGCACUUCUU | 3467 | AAGAAGUGCUGGCCCAGCA |
| siRNA 1417 | 1417 | GCUGGGCCAGCACUUCUUC | 3468 | GAAGAAGUGCUGGCCCAGC |
| siRNA 1418 | 1418 | CUGGGCCAGCACUUCUUCA | 3469 | UGAAGAAGUGCUGGCCCAG |
| siRNA 1419 | 1419 | UGGGCCAGCACUUCUUCAA | 3470 | UUGAAGAAGUGCUGGCCCA |
| siRNA 1420 | 1420 | GGGCCAGCACUUCUUCAAC | 3471 | GUUGAAGAAGUGCUGGCCC |
| siRNA 1421 | 1421 | GGCCAGCACUUCUUCAACC | 3472 | GGUUGAAGAAGUGCUGGCC |
| siRNA 1422 | 1422 | GCCAGCACUUCUUCAACCG | 3473 | CGGUUGAAGAAGUGCUGGC |
| siRNA 1423 | 1423 | CCAGCACUUCUUCAACCGC | 3474 | GCGGUUGAAGAAGUGCUGG |
| siRNA 1424 | 1424 | CAGCACUUCUUCAACCGCA | 3475 | UGCGGUUGAAGAAGUGCUG |
| siRNA 1425 | 1425 | AGCACUUCUUCAACCGCAC | 3476 | GUGCGGUUGAAGAAGUGCU |
| siRNA 1426 | 1426 | GCACUUCUUCAACCGCACG | 3477 | CGUGCGGUUGAAGAAGUGC |
| siRNA 1427 | 1427 | CACUUCUUCAACCGCACGA | 3478 | UCGUGCGGUUGAAGAAGUG |
| siRNA 1428 | 1428 | ACUUCUUCAACCGCACGAC | 3479 | GUCGUGCGGUUGAAGAAGU |
| siRNA 1429 | 1429 | CUUCUUCAACCGCACGACG | 3480 | CGUCGUGCGGUUGAAGAAG |
| siRNA 1430 | 1430 | UUCUUCAACCGCACGACGG | 3481 | CCGUCGUGCGGUUGAAGAA |
| siRNA 1431 | 1431 | UCUUCAACCGCACGACGGA | 3482 | UCCGUCGUGCGGUUGAAGA |
| siRNA 1432 | 1432 | CUUCAACCGCACGACGGAC | 3483 | GUCCGUCGUGCGGUUGAAG |
| siRNA 1433 | 1433 | UUCAACCGCACGACGGACG | 3484 | CGUCCGUCGUGCGGUUGAA |
| SiRNA 1434 | 1434 | UCAACCGCACGACGGACGU | 3485 | ACGUCCGUCGUGCGGUUGA |
| siRNA 1435 | 1435 | CAACCGCACGACGGACGUG | 3486 | CACGUCCGUCGUGCGGUUG |
| siRNA 1436 | 1436 | AACCGCACGACGGACGUGA | 3487 | UCACGUCCGUCGUGCGGUU |
| siRNA 1437 | 1437 | ACCGCACGACGGACGUGAC | 3488 | GUCACGUCCGUCGUGCGGU |
| siRNA 1438 | 1438 | CCGCACGACGGACGUGACG | 3489 | CGUCACGUCCGUCGUGCGG |
| siRNA 1439 | 1439 | CGCACGACGGACGUGACGC | 3490 | GCGUCACGUCCGUCGUGCG |
| siRNA 1440 | 1440 | GCACGACGGACGUGACGCA | 3491 | UGCGUCACGUCCGUCGUGC |
| siRNA 1441 | 1441 | CACGACGGACGUGACGCAG | 3492 | CUGCGUCACGUCCGUCGUG |
| siRNA 1442 | 1442 | ACGACGGACGUGACGCAGA | 3493 | UCUGCGUCACGUCCGUCGU |
| siRNA 1443 | 1443 | CGACGGACGUGACGCAGAC | 3494 | GUCUGCGUCACGUCCGUCG |
| siRNA 1444 | 1444 | GACGGACGUGACGCAGACC | 3495 | GGUCUGCGUCACGUCCGUC |
| siRNA 1445 | 1445 | ACGGACGUGACGCAGACCU | 3496 | AGGUCUGCGUCACGUCCGU |
| siRNA 1446 | 1446 | CGGACGUGACGCAGACCUU | 3497 | AAGGUCUGCGUCACGUCCG |
| siRNA 1447 | 1447 | GGACGUGACGCAGACCUUC | 3498 | GAAGGUCUGCGUCACGUCC |
| siRNA 1448 | 1448 | GACGUGACGCAGACCUUCG | 3499 | CGAAGGUCUGCGUCACGUC |
| siRNA 1449 | 1449 | ACGUGACGCAGACCUUCGG | 3500 | CCGAAGGUCUGCGUCACGU |
| SiRNA 1450 | 1450 | CGUGACGCAGACCUUCGGC | 3501 | GCCGAAGGUCUGCGUCACG |
| siRNA 1451 | 1451 | GUGACGCAGACCUUCGGCA | 3502 | UGCCGAAGGUCUGCGUCAC |
| siRNA 1452 | 1452 | UGACGCAGACCUUCGGCAU | 3503 | AUGCCGAAGGUCUGCGUCA |
| SiRNA 1453 | 1453 | GACGCAGACCUUCGGCAUC | 3504 | GAUGCCGAAGGUCUGCGUC |
| siRNA 1454 | 1454 | ACGCAGACCUUCGGCAUCG | 3505 | CGAUGCCGAAGGUCUGCGU |
| siRNA 1455 | 1455 | CGCAGACCUUCGGCAUCGA | 3506 | UCGAUGCCGAAGGUCUGCG |
| siRNA 1456 | 1456 | GCAGACCUUCGGCAUCGAG | 3507 | CUCGAUGCCGAAGGUCUGC |
| siRNA 1457 | 1457 | CAGACCUUCGGCAUCGAGA | 3508 | UCUCGAUGCCGAAGGUCUG |
| siRNA 1458 | 1458 | AGACCUUCGGCAUCGAGAA | 3509 | UUCUCGAUGCCGAAGGUCU |
| SiRNA 1459 | 1459 | GACCUUCGGCAUCGAGAAG | 3510 | CUUCUCGAUGCCGAAGGUC |
| siRNA 1460 | 1460 | ACCUUCGGCAUCGAGAAGU | 3511 | ACUUCUCGAUGCCGAAGGU |
| siRNA 1461 | 1461 | CCUUCGGCAUCGAGAAGUA | 3512 | UACUUCUCGAUGCCGAAGG |
| siRNA 1462 | 1462 | CUUCGGCAUCGAGAAGUAC | 3513 | GUACUUCUCGAUGCCGAAG |
| siRNA 1463 | 1463 | UUCGGCAUCGAGAAGUACA | 3514 | UGUACUUCUCGAUGCCGAA |
| siRNA 1464 | 1464 | UCGGCAUCGAGAAGUACAU | 3515 | AUGUACUUCUCGAUGCCGA |
| siRNA 1465 | 1465 | CGGCAUCGAGAAGUACAUC | 3516 | GAUGUACUUCUCGAUGCCG |
| siRNA 1466 | 1466 | GGCAUCGAGAAGUACAUCC | 3517 | GGAUGUACUUCUCGAUGCC |
| siRNA 1467 | 1467 | GCAUCGAGAAGUACAUCCC | 3518 | GGGAUGUACUUCUCGAUGC |
| siRNA 1468 | 1468 | CAUCGAGAAGUACAUCCCG | 3519 | CGGGAUGUACUUCUCGAUG |
| siRNA 1469 | 1469 | AUCGAGAAGUACAUCCCGU | 3520 | ACGGGAUGUACUUCUCGAU |
| siRNA 1470 | 1470 | UCGAGAAGUACAUCCCGUA | 3521 | UACGGGAUGUACUUCUCGA |
| siRNA 1471 | 1471 | CGAGAAGUACAUCCCGUAC | 3522 | GUACGGGAUGUACUUCUCG |
| siRNA 1472 | 1472 | GAGAAGUACAUCCCGUACA | 3523 | UGUACGGGAUGUACUUCUC |
| siRNA 1473 | 1473 | AGAAGUACAUCCCGUACAC | 3524 | GUGUACGGGAUGUACUUCU |
| siRNA 1474 | 1474 | GAAGUACAUCCCGUACACC | 3525 | GGUGUACGGGAUGUACUUC |
| siRNA 1475 | 1475 | AAGUACAUCCCGUACACCC | 3526 | GGGUGUACGGGAUGUACUU |
| siRNA 1476 | 1476 | AGUACAUCCCGUACACCCU | 3527 | AGGGUGUACGGGAUGUACU |
| siRNA 1477 | 1477 | GUACAUCCCGUACACCCUG | 3528 | CAGGGUGUACGGGAUGUAC |
| siRNA 1478 | 1478 | UACAUCCCGUACACCCUGU | 3529 | ACAGGGUGUACGGGAUGUA |
| siRNA 1479 | 1479 | ACAUCCCGUACACCCUGUA | 3530 | UACAGGGUGUACGGGAUGU |
| SiRNA 1480 | 1480 | CAUCCCGUACACCCUGUAC | 3531 | GUACAGGGUGUACGGGAUG |
| siRNA 1481 | 1481 | AUCCCGUACACCCUGUACU | 3532 | AGUACAGGGUGUACGGGAU |
| SiRNA 1482 | 1482 | UCCCGUACACCCUGUACUC | 3533 | GAGUACAGGGUGUACGGGA |
| siRNA 1483 | 1483 | CCCGUACACCCUGUACUCG | 3534 | CGAGUACAGGGUGUACGGG |
| SiRNA 1484 | 1484 | CCGUACACCCUGUACUCGG | 3535 | CCGAGUACAGGGUGUACGG |
| siRNA 1485 | 1485 | CGUACACCCUGUACUCGGU | 3536 | ACCGAGUACAGGGUGUACG |
| siRNA 1486 | 1486 | GUACACCCUGUACUCGGUG | 3537 | CACCGAGUACAGGGUGUAC |
| siRNA 1487 | 1487 | UACACCCUGUACUCGGUGU | 3538 | ACACCGAGUACAGGGUGUA |
| siRNA 1488 | 1488 | ACACCCUGUACUCGGUGUU | 3539 | AACACCGAGUACAGGGUGU |
| SiRNA 1489 | 1489 | CACCCUGUACUCGGUGUUC | 3540 | GAACACCGAGUACAGGGUG |
| siRNA 1490 | 1490 | ACCCUGUACUCGGUGUUCA | 3541 | UGAACACCGAGUACAGGGU |
| siRNA 1491 | 1491 | CCCUGUACUCGGUGUUCAA | 3542 | UUGAACACCGAGUACAGGG |
| siRNA 1492 | 1492 | CCUGUACUCGGUGUUCAAC | 3543 | GUUGAACACCGAGUACAGG |
| siRNA 1493 | 1493 | CUGUACUCGGUGUUCAACC | 3544 | GGUUGAACACCGAGUACAG |
| siRNA 1494 | 1494 | UGUACUCGGUGUUCAACCC | 3545 | GGGUUGAACACCGAGUACA |
| siRNA 1495 | 1495 | GUACUCGGUGUUCAACCCC | 3546 | GGGGUUGAACACCGAGUAC |
| siRNA 1496 | 1496 | UACUCGGUGUUCAACCCCA | 3547 | UGGGGUUGAACACCGAGUA |
| siRNA 1497 | 1497 | ACUCGGUGUUCAACCCCAG | 3548 | CUGGGGUUGAACACCGAGU |
| siRNA 1498 | 1498 | CUCGGUGUUCAACCCCAGC | 3549 | GCUGGGGUUGAACACCGAG |
| siRNA 1499 | 1499 | UCGGUGUUCAACCCCAGCG | 3550 | CGCUGGGGUUGAACACCGA |
| siRNA 1500 | 1500 | CGGUGUUCAACCCCAGCGA | 3551 | UCGCUGGGGUUGAACACCG |
| siRNA 1501 | 1501 | GGUGUUCAACCCCAGCGAC | 3552 | GUCGCUGGGGUUGAACACC |
| siRNA 1502 | 1502 | GUGUUCAACCCCAGCGACC | 3553 | GGUCGCUGGGGUUGAACAC |
| siRNA 1503 | 1503 | UGUUCAACCCCAGCGACCA | 3554 | UGGUCGCUGGGGUUGAACA |
| siRNA 1504 | 1504 | GUUCAACCCCAGCGACCAC | 3555 | GUGGUCGCUGGGGUUGAAC |
| siRNA 1505 | 1505 | UUCAACCCCAGCGACCACG | 3556 | CGUGGUCGCUGGGGUUGAA |
| siRNA 1506 | 1506 | UCAACCCCAGCGACCACGA | 3557 | UCGUGGUCGCUGGGGUUGA |
| siRNA 1507 | 1507 | CAACCCCAGCGACCACGAC | 3558 | GUCGUGGUCGCUGGGGUUG |
| siRNA 1508 | 1508 | AACCCCAGCGACCACGACC | 3559 | GGUCGUGGUCGCUGGGGUU |
| siRNA 1509 | 1509 | ACCCCAGCGACCACGACCU | 3560 | AGGUCGUGGUCGCUGGGGU |
| siRNA 1510 | 1510 | CCCCAGCGACCACGACCUC | 3561 | GAGGUCGUGGUCGCUGGGG |
| siRNA 1511 | 1511 | CCCAGCGACCACGACCUCG | 3562 | CGAGGUCGUGGUCGCUGGG |
| siRNA 1512 | 1512 | CCAGCGACCACGACCUCGU | 3563 | ACGAGGUCGUGGUCGCUGG |
| siRNA 1513 | 1513 | CAGCGACCACGACCUCGUC | 3564 | GACGAGGUCGUGGUCGCUG |
| siRNA 1514 | 1514 | AGCGACCACGACCUCGUCC | 3565 | GGACGAGGUCGUGGUCGCU |
| siRNA 1515 | 1515 | GCGACCACGACCUCGUCCU | 3566 | AGGACGAGGUCGUGGUCGC |
| siRNA 1516 | 1516 | CGACCACGACCUCGUCCUG | 3567 | CAGGACGAGGUCGUGGUCG |
| siRNA 1517 | 1517 | GACCACGACCUCGUCCUGA | 3568 | UCAGGACGAGGUCGUGGUC |
| siRNA 1518 | 1518 | ACCACGACCUCGUCCUGAU | 3569 | AUCAGGACGAGGUCGUGGU |
| siRNA 1519 | 1519 | CCACGACCUCGUCCUGAUC | 3570 | GAUCAGGACGAGGUCGUGG |
| siRNA 1520 | 1520 | CACGACCUCGUCCUGAUCC | 3571 | GGAUCAGGACGAGGUCGUG |
| siRNA 1521 | 1521 | ACGACCUCGUCCUGAUCCG | 3572 | CGGAUCAGGACGAGGUCGU |
| siRNA 1522 | 1522 | CGACCUCGUCCUGAUCCGG | 3573 | CCGGAUCAGGACGAGGUCG |
| siRNA 1523 | 1523 | GACCUCGUCCUGAUCCGGC | 3574 | GCCGGAUCAGGACGAGGUC |
| siRNA 1524 | 1524 | ACCUCGUCCUGAUCCGGCU | 3575 | AGCCGGAUCAGGACGAGGU |
| siRNA 1525 | 1525 | CCUCGUCCUGAUCCGGCUG | 3576 | CAGCCGGAUCAGGACGAGG |
| siRNA 1526 | 1526 | CUCGUCCUGAUCCGGCUGA | 3577 | UCAGCCGGAUCAGGACGAG |
| siRNA 1527 | 1527 | UCGUCCUGAUCCGGCUGAA | 3578 | UUCAGCCGGAUCAGGACGA |
| siRNA 1528 | 1528 | CGUCCUGAUCCGGCUGAAG | 3579 | CUUCAGCCGGAUCAGGACG |
| siRNA 1529 | 1529 | GUCCUGAUCCGGCUGAAGA | 3580 | UCUUCAGCCGGAUCAGGAC |
| siRNA 1530 | 1530 | UCCUGAUCCGGCUGAAGAA | 3581 | UUCUUCAGCCGGAUCAGGA |
| siRNA 1531 | 1531 | CCUGAUCCGGCUGAAGAAG | 3582 | CUUCUUCAGCCGGAUCAGG |
| siRNA 1532 | 1532 | CUGAUCCGGCUGAAGAAGA | 3583 | UCUUCUUCAGCCGGAUCAG |
| siRNA 1533 | 1533 | UGAUCCGGCUGAAGAAGAA | 3584 | UUCUUCUUCAGCCGGAUCA |
| siRNA 1534 | 1534 | GAUCCGGCUGAAGAAGAAA | 3585 | UUUCUUCUUCAGCCGGAUC |
| siRNA 1535 | 1535 | AUCCGGCUGAAGAAGAAAG | 3586 | CUUUCUUCUUCAGCCGGAU |
| siRNA 1536 | 1536 | UCCGGCUGAAGAAGAAAGG | 3587 | CCUUUCUUCUUCAGCCGGA |
| siRNA 1537 | 1537 | CCGGCUGAAGAAGAAAGGG | 3588 | CCCUUUCUUCUUCAGCCGG |
| siRNA 1538 | 1538 | CGGCUGAAGAAGAAAGGGG | 3589 | CCCCUUUCUUCUUCAGCCG |
| siRNA 1539 | 1539 | GGCUGAAGAAGAAAGGGGA | 3590 | UCCCCUUUCUUCUUCAGCC |
| siRNA 1540 | 1540 | GCUGAAGAAGAAAGGGGAC | 3591 | GUCCCCUUUCUUCUUCAGC |
| siRNA 1541 | 1541 | CUGAAGAAGAAAGGGGACC | 3592 | GGUCCCCUUUCUUCUUCAG |
| siRNA 1542 | 1542 | UGAAGAAGAAAGGGGACCG | 3593 | CGGUCCCCUUUCUUCUUCA |
| siRNA 1543 | 1543 | GAAGAAGAAAGGGGACCGC | 3594 | GCGGUCCCCUUUCUUCUUC |
| siRNA 1544 | 1544 | AAGAAGAAAGGGGACCGCU | 3595 | AGCGGUCCCCUUUCUUCUU |
| siRNA 1545 | 1545 | AGAAGAAAGGGGACCGCUG | 3596 | CAGCGGUCCCCUUUCUUCU |
| siRNA 1546 | 1546 | GAAGAAAGGGGACCGCUGU | 3597 | ACAGCGGUCCCCUUUCUUC |
| siRNA 1547 | 1547 | AAGAAAGGGGACCGCUGUG | 3598 | CACAGCGGUCCCCUUUCUU |
| siRNA 1548 | 1548 | AGAAAGGGGACCGCUGUGC | 3599 | GCACAGCGGUCCCCUUUCU |
| siRNA 1549 | 1549 | GAAAGGGGACCGCUGUGCC | 3600 | GGCACAGCGGUCCCCUUUC |
| siRNA 1550 | 1550 | AAAGGGGACCGCUGUGCCA | 3601 | UGGCACAGCGGUCCCCUUU |
| siRNA 1551 | 1551 | AAGGGGACCGCUGUGCCAC | 3602 | GUGGCACAGCGGUCCCCUU |
| siRNA 1552 | 1552 | AGGGGACCGCUGUGCCACA | 3603 | UGUGGCACAGCGGUCCCCU |
| siRNA 1553 | 1553 | GGGGACCGCUGUGCCACAC | 3604 | GUGUGGCACAGCGGUCCCC |
| siRNA 1554 | 1554 | GGGACCGCUGUGCCACACG | 3605 | CGUGUGGCACAGCGGUCCC |
| siRNA 1555 | 1555 | GGACCGCUGUGCCACACGC | 3606 | GCGUGUGGCACAGCGGUCC |
| siRNA 1556 | 1556 | GACCGCUGUGCCACACGCU | 3607 | AGCGUGUGGCACAGCGGUC |
| siRNA 1557 | 1557 | ACCGCUGUGCCACACGCUC | 3608 | GAGCGUGUGGCACAGCGGU |
| siRNA 1558 | 1558 | CCGCUGUGCCACACGCUCG | 3609 | CGAGCGUGUGGCACAGCGG |
| siRNA 1559 | 1559 | CGCUGUGCCACACGCUCGC | 3610 | GCGAGCGUGUGGCACAGCG |
| siRNA 1560 | 1560 | GCUGUGCCACACGCUCGCA | 3611 | UGCGAGCGUGUGGCACAGC |
| siRNA 1561 | 1561 | CUGUGCCACACGCUCGCAG | 3612 | CUGCGAGCGUGUGGCACAG |
| siRNA 1562 | 1562 | UGUGCCACACGCUCGCAGU | 3613 | ACUGCGAGCGUGUGGCACA |
| siRNA 1563 | 1563 | GUGCCACACGCUCGCAGUU | 3614 | AACUGCGAGCGUGUGGCAC |
| siRNA 1564 | 1564 | UGCCACACGCUCGCAGUUC | 3615 | GAACUGCGAGCGUGUGGCA |
| siRNA 1565 | 1565 | GCCACACGCUCGCAGUUCG | 3616 | CGAACUGCGAGCGUGUGGC |
| siRNA 1566 | 1566 | CCACACGCUCGCAGUUCGU | 3617 | ACGAACUGCGAGCGUGUGG |
| siRNA 1567 | 1567 | CACACGCUCGCAGUUCGUG | 3618 | CACGAACUGCGAGCGUGUG |
| siRNA 1568 | 1568 | ACACGCUCGCAGUUCGUGC | 3619 | GCACGAACUGCGAGCGUGU |
| siRNA 1569 | 1569 | CACGCUCGCAGUUCGUGCA | 3620 | UGCACGAACUGCGAGCGUG |
| SiRNA 1570 | 1570 | ACGCUCGCAGUUCGUGCAG | 3621 | CUGCACGAACUGCGAGCGU |
| siRNA 1571 | 1571 | CGCUCGCAGUUCGUGCAGC | 3622 | GCUGCACGAACUGCGAGCG |
| siRNA 1572 | 1572 | GCUCGCAGUUCGUGCAGCC | 3623 | GGCUGCACGAACUGCGAGC |
| siRNA 1573 | 1573 | CUCGCAGUUCGUGCAGCCC | 3624 | GGGCUGCACGAACUGCGAG |
| siRNA 1574 | 1574 | UCGCAGUUCGUGCAGCCCA | 3625 | UGGGCUGCACGAACUGCGA |
| siRNA 1575 | 1575 | CGCAGUUCGUGCAGCCCAU | 3626 | AUGGGCUGCACGAACUGCG |
| siRNA 1576 | 1576 | GCAGUUCGUGCAGCCCAUC | 3627 | GAUGGGCUGCACGAACUGC |
| siRNA 1577 | 1577 | CAGUUCGUGCAGCCCAUCU | 3628 | AGAUGGGCUGCACGAACUG |
| siRNA 1578 | 1578 | AGUUCGUGCAGCCCAUCUG | 3629 | CAGAUGGGCUGCACGAACU |
| siRNA 1579 | 1579 | GUUCGUGCAGCCCAUCUGC | 3630 | GCAGAUGGGCUGCACGAAC |
| siRNA 1580 | 1580 | UUCGUGCAGCCCAUCUGCC | 3631 | GGCAGAUGGGCUGCACGAA |
| siRNA 1581 | 1581 | UCGUGCAGCCCAUCUGCCU | 3632 | AGGCAGAUGGGCUGCACGA |
| siRNA 1582 | 1582 | CGUGCAGCCCAUCUGCCUG | 3633 | CAGGCAGAUGGGCUGCACG |
| siRNA 1583 | 1583 | GUGCAGCCCAUCUGCCUGC | 3634 | GCAGGCAGAUGGGCUGCAC |
| siRNA 1584 | 1584 | UGCAGCCCAUCUGCCUGCC | 3635 | GGCAGGCAGAUGGGCUGCA |
| siRNA 1585 | 1585 | GCAGCCCAUCUGCCUGCCC | 3636 | GGGCAGGCAGAUGGGCUGC |
| siRNA 1586 | 1586 | CAGCCCAUCUGCCUGCCCG | 3637 | CGGGCAGGCAGAUGGGCUG |
| siRNA 1587 | 1587 | AGCCCAUCUGCCUGCCCGA | 3638 | UCGGGCAGGCAGAUGGGCU |
| siRNA 1588 | 1588 | GCCCAUCUGCCUGCCCGAG | 3639 | CUCGGGCAGGCAGAUGGGC |
| siRNA 1589 | 1589 | CCCAUCUGCCUGCCCGAGC | 3640 | GCUCGGGCAGGCAGAUGGG |
| siRNA 1590 | 1590 | CCAUCUGCCUGCCCGAGCC | 3641 | GGCUCGGGCAGGCAGAUGG |
| siRNA 1591 | 1591 | CAUCUGCCUGCCCGAGCCC | 3642 | GGGCUCGGGCAGGCAGAUG |
| siRNA 1592 | 1592 | AUCUGCCUGCCCGAGCCCG | 3643 | CGGGCUCGGGCAGGCAGAU |
| siRNA 1593 | 1593 | UCUGCCUGCCCGAGCCCGG | 3644 | CCGGGCUCGGGCAGGCAGA |
| siRNA 1594 | 1594 | CUGCCUGCCCGAGCCCGGC | 3645 | GCCGGGCUCGGGCAGGCAG |
| siRNA 1595 | 1595 | UGCCUGCCCGAGCCCGGCA | 3646 | UGCCGGGCUCGGGCAGGCA |
| siRNA 1596 | 1596 | GCCUGCCCGAGCCCGGCAG | 3647 | CUGCCGGGCUCGGGCAGGC |
| siRNA 1597 | 1597 | CCUGCCCGAGCCCGGCAGC | 3648 | GCUGCCGGGCUCGGGCAGG |
| siRNA 1598 | 1598 | CUGCCCGAGCCCGGCAGCA | 3649 | UGCUGCCGGGCUCGGGCAG |
| siRNA 1599 | 1599 | UGCCCGAGCCCGGCAGCAC | 3650 | GUGCUGCCGGGCUCGGGCA |
| siRNA 1600 | 1600 | GCCCGAGCCCGGCAGCACC | 3651 | GGUGCUGCCGGGCUCGGGC |
| siRNA 1601 | 1601 | CCCGAGCCCGGCAGCACCU | 3652 | AGGUGCUGCCGGGCUCGGG |
| siRNA 1602 | 1602 | CCGAGCCCGGCAGCACCUU | 3653 | AAGGUGCUGCCGGGCUCGG |
| siRNA 1603 | 1603 | CGAGCCCGGCAGCACCUUC | 3654 | GAAGGUGCUGCCGGGCUCG |
| siRNA 1604 | 1604 | GAGCCCGGCAGCACCUUCC | 3655 | GGAAGGUGCUGCCGGGCUC |
| siRNA 1605 | 1605 | AGCCCGGCAGCACCUUCCC | 3656 | GGGAAGGUGCUGCCGGGCU |
| siRNA 1606 | 1606 | GCCCGGCAGCACCUUCCCC | 3657 | GGGGAAGGUGCUGCCGGGC |
| siRNA 1607 | 1607 | CCCGGCAGCACCUUCCCCG | 3658 | CGGGGAAGGUGCUGCCGGG |
| siRNA 1608 | 1608 | CCGGCAGCACCUUCCCCGC | 3659 | GCGGGGAAGGUGCUGCCGG |
| siRNA 1609 | 1609 | CGGCAGCACCUUCCCCGCA | 3660 | UGCGGGGAAGGUGCUGCCG |
| siRNA 1610 | 1610 | GGCAGCACCUUCCCCGCAG | 3661 | CUGCGGGGAAGGUGCUGCC |
| siRNA 1611 | 1611 | GCAGCACCUUCCCCGCAGG | 3662 | CCUGCGGGGAAGGUGCUGC |
| siRNA 1612 | 1612 | CAGCACCUUCCCCGCAGGA | 3663 | UCCUGCGGGGAAGGUGCUG |
| siRNA 1613 | 1613 | AGCACCUUCCCCGCAGGAC | 3664 | GUCCUGCGGGGAAGGUGCU |
| siRNA 1614 | 1614 | GCACCUUCCCCGCAGGACA | 3665 | UGUCCUGCGGGGAAGGUGC |
| siRNA 1615 | 1615 | CACCUUCCCCGCAGGACAC | 3666 | GUGUCCUGCGGGGAAGGUG |
| siRNA 1616 | 1616 | ACCUUCCCCGCAGGACACA | 3667 | UGUGUCCUGCGGGGAAGGU |
| siRNA 1617 | 1617 | CCUUCCCCGCAGGACACAA | 3668 | UUGUGUCCUGCGGGGAAGG |
| siRNA 1618 | 1618 | CUUCCCCGCAGGACACAAG | 3669 | CUUGUGUCCUGCGGGGAAG |
| siRNA 1619 | 1619 | UUCCCCGCAGGACACAAGU | 3670 | ACUUGUGUCCUGCGGGGAA |
| siRNA 1620 | 1620 | UCCCCGCAGGACACAAGUG | 3671 | CACUUGUGUCCUGCGGGGA |
| siRNA 1621 | 1621 | CCCCGCAGGACACAAGUGC | 3672 | GCACUUGUGUCCUGCGGGG |
| siRNA 1622 | 1622 | CCCGCAGGACACAAGUGCC | 3673 | GGCACUUGUGUCCUGCGGG |
| siRNA 1623 | 1623 | CCGCAGGACACAAGUGCCA | 3674 | UGGCACUUGUGUCCUGCGG |
| SiRNA 1624 | 1624 | CGCAGGACACAAGUGCCAG | 3675 | CUGGCACUUGUGUCCUGCG |
| siRNA 1625 | 1625 | GCAGGACACAAGUGCCAGA | 3676 | UCUGGCACUUGUGUCCUGC |
| siRNA 1626 | 1626 | CAGGACACAAGUGCCAGAU | 3677 | AUCUGGCACUUGUGUCCUG |
| siRNA 1627 | 1627 | AGGACACAAGUGCCAGAUU | 3678 | AAUCUGGCACUUGUGUCCU |
| siRNA 1628 | 1628 | GGACACAAGUGCCAGAUUG | 3679 | CAAUCUGGCACUUGUGUCC |
| siRNA 1629 | 1629 | GACACAAGUGCCAGAUUGC | 3680 | GCAAUCUGGCACUUGUGUC |
| siRNA 1630 | 1630 | ACACAAGUGCCAGAUUGCG | 3681 | CGCAAUCUGGCACUUGUGU |
| siRNA 1631 | 1631 | CACAAGUGCCAGAUUGCGG | 3682 | CCGCAAUCUGGCACUUGUG |
| siRNA 1632 | 1632 | ACAAGUGCCAGAUUGCGGG | 3683 | CCCGCAAUCUGGCACUUGU |
| siRNA 1633 | 1633 | CAAGUGCCAGAUUGCGGGC | 3684 | GCCCGCAAUCUGGCACUUG |
| siRNA 1634 | 1634 | AAGUGCCAGAUUGCGGGCU | 3685 | AGCCCGCAAUCUGGCACUU |
| siRNA 1635 | 1635 | AGUGCCAGAUUGCGGGCUG | 3686 | CAGCCCGCAAUCUGGCACU |
| siRNA 1636 | 1636 | GUGCCAGAUUGCGGGCUGG | 3687 | CCAGCCCGCAAUCUGGCAC |
| siRNA 1637 | 1637 | UGCCAGAUUGCGGGCUGGG | 3688 | CCCAGCCCGCAAUCUGGCA |
| siRNA 1638 | 1638 | GCCAGAUUGCGGGCUGGGG | 3689 | CCCCAGCCCGCAAUCUGGC |
| siRNA 1639 | 1639 | CCAGAUUGCGGGCUGGGGC | 3690 | GCCCCAGCCCGCAAUCUGG |
| siRNA 1640 | 1640 | CAGAUUGCGGGCUGGGGCC | 3691 | GGCCCCAGCCCGCAAUCUG |
| siRNA 1641 | 1641 | AGAUUGCGGGCUGGGGCCA | 3692 | UGGCCCCAGCCCGCAAUCU |
| siRNA 1642 | 1642 | GAUUGCGGGCUGGGGCCAC | 3693 | GUGGCCCCAGCCCGCAAUC |
| siRNA 1643 | 1643 | AUUGCGGGCUGGGGCCACU | 3694 | AGUGGCCCCAGCCCGCAAU |
| siRNA 1644 | 1644 | UUGCGGGCUGGGGCCACUU | 3695 | AAGUGGCCCCAGCCCGCAA |
| siRNA 1645 | 1645 | UGCGGGCUGGGGCCACUUG | 3696 | CAAGUGGCCCCAGCCCGCA |
| siRNA 1646 | 1646 | GCGGGCUGGGGCCACUUGG | 3697 | CCAAGUGGCCCCAGCCCGC |
| siRNA 1647 | 1647 | CGGGCUGGGGCCACUUGGA | 3698 | UCCAAGUGGCCCCAGCCCG |
| siRNA 1648 | 1648 | GGGCUGGGGCCACUUGGAU | 3699 | AUCCAAGUGGCCCCAGCCC |
| SiRNA 1649 | 1649 | GGCUGGGGCCACUUGGAUG | 3700 | CAUCCAAGUGGCCCCAGCC |
| siRNA 1650 | 1650 | GCUGGGGCCACUUGGAUGA | 3701 | UCAUCCAAGUGGCCCCAGC |
| siRNA 1651 | 1651 | CUGGGGCCACUUGGAUGAG | 3702 | CUCAUCCAAGUGGCCCCAG |
| siRNA 1652 | 1652 | UGGGGCCACUUGGAUGAGA | 3703 | UCUCAUCCAAGUGGCCCCA |
| siRNA 1653 | 1653 | GGGGCCACUUGGAUGAGAA | 3704 | UUCUCAUCCAAGUGGCCCC |
| siRNA 1654 | 1654 | GGGCCACUUGGAUGAGAAC | 3705 | GUUCUCAUCCAAGUGGCCC |
| siRNA 1655 | 1655 | GGCCACUUGGAUGAGAACG | 3706 | CGUUCUCAUCCAAGUGGCC |
| siRNA 1656 | 1656 | GCCACUUGGAUGAGAACGU | 3707 | ACGUUCUCAUCCAAGUGGC |
| siRNA 1657 | 1657 | CCACUUGGAUGAGAACGUG | 3708 | CACGUUCUCAUCCAAGUGG |
| siRNA 1658 | 1658 | CACUUGGAUGAGAACGUGA | 3709 | UCACGUUCUCAUCCAAGUG |
| siRNA 1659 | 1659 | ACUUGGAUGAGAACGUGAG | 3710 | CUCACGUUCUCAUCCAAGU |
| siRNA 1660 | 1660 | CUUGGAUGAGAACGUGAGC | 3711 | GCUCACGUUCUCAUCCAAG |
| siRNA 1661 | 1661 | UUGGAUGAGAACGUGAGCG | 3712 | CGCUCACGUUCUCAUCCAA |
| siRNA 1662 | 1662 | UGGAUGAGAACGUGAGCGG | 3713 | CCGCUCACGUUCUCAUCCA |
| siRNA 1663 | 1663 | GGAUGAGAACGUGAGCGGC | 3714 | GCCGCUCACGUUCUCAUCC |
| siRNA 1664 | 1664 | GAUGAGAACGUGAGCGGCU | 3715 | AGCCGCUCACGUUCUCAUC |
| siRNA 1665 | 1665 | AUGAGAACGUGAGCGGCUA | 3716 | UAGCCGCUCACGUUCUCAU |
| siRNA 1666 | 1666 | UGAGAACGUGAGCGGCUAC | 3717 | GUAGCCGCUCACGUUCUCA |
| siRNA 1667 | 1667 | GAGAACGUGAGCGGCUACU | 3718 | AGUAGCCGCUCACGUUCUC |
| siRNA 1668 | 1668 | AGAACGUGAGCGGCUACUC | 3719 | GAGUAGCCGCUCACGUUCU |
| siRNA 1669 | 1669 | GAACGUGAGCGGCUACUCC | 3720 | GGAGUAGCCGCUCACGUUC |
| siRNA 1670 | 1670 | AACGUGAGCGGCUACUCCA | 3721 | UGGAGUAGCCGCUCACGUU |
| siRNA 1671 | 1671 | ACGUGAGCGGCUACUCCAG | 3722 | CUGGAGUAGCCGCUCACGU |
| siRNA 1672 | 1672 | CGUGAGCGGCUACUCCAGC | 3723 | GCUGGAGUAGCCGCUCACG |
| siRNA 1673 | 1673 | GUGAGCGGCUACUCCAGCU | 3724 | AGCUGGAGUAGCCGCUCAC |
| siRNA 1674 | 1674 | UGAGCGGCUACUCCAGCUC | 3725 | GAGCUGGAGUAGCCGCUCA |
| siRNA 1675 | 1675 | GAGCGGCUACUCCAGCUCC | 3726 | GGAGCUGGAGUAGCCGCUC |
| siRNA 1676 | 1676 | AGCGGCUACUCCAGCUCCC | 3727 | GGGAGCUGGAGUAGCCGCU |
| siRNA 1677 | 1677 | GCGGCUACUCCAGCUCCCU | 3728 | AGGGAGCUGGAGUAGCCGC |
| siRNA 1678 | 1678 | CGGCUACUCCAGCUCCCUG | 3729 | CAGGGAGCUGGAGUAGCCG |
| siRNA 1679 | 1679 | GGCUACUCCAGCUCCCUGC | 3730 | GCAGGGAGCUGGAGUAGCC |
| siRNA 1680 | 1680 | GCUACUCCAGCUCCCUGCG | 3731 | CGCAGGGAGCUGGAGUAGC |
| siRNA 1681 | 1681 | CUACUCCAGCUCCCUGCGG | 3732 | CCGCAGGGAGCUGGAGUAG |
| siRNA 1682 | 1682 | UACUCCAGCUCCCUGCGGG | 3733 | CCCGCAGGGAGCUGGAGUA |
| siRNA 1683 | 1683 | ACUCCAGCUCCCUGCGGGA | 3734 | UCCCGCAGGGAGCUGGAGU |
| siRNA 1684 | 1684 | CUCCAGCUCCCUGCGGGAG | 3735 | CUCCCGCAGGGAGCUGGAG |
| siRNA 1685 | 1685 | UCCAGCUCCCUGCGGGAGG | 3736 | CCUCCCGCAGGGAGCUGGA |
| siRNA 1686 | 1686 | CCAGCUCCCUGCGGGAGGC | 3737 | GCCUCCCGCAGGGAGCUGG |
| siRNA 1687 | 1687 | CAGCUCCCUGCGGGAGGCC | 3738 | GGCCUCCCGCAGGGAGCUG |
| siRNA 1688 | 1688 | AGCUCCCUGCGGGAGGCCC | 3739 | GGGCCUCCCGCAGGGAGCU |
| siRNA 1689 | 1689 | GCUCCCUGCGGGAGGCCCU | 3740 | AGGGCCUCCCGCAGGGAGC |
| siRNA 1690 | 1690 | CUCCCUGCGGGAGGCCCUG | 3741 | CAGGGCCUCCCGCAGGGAG |
| siRNA 1691 | 1691 | UCCCUGCGGGAGGCCCUGG | 3742 | CCAGGGCCUCCCGCAGGGA |
| siRNA 1692 | 1692 | CCCUGCGGGAGGCCCUGGU | 3743 | ACCAGGGCCUCCCGCAGGG |
| siRNA 1693 | 1693 | CCUGCGGGAGGCCCUGGUC | 3744 | GACCAGGGCCUCCCGCAGG |
| SiRNA 1694 | 1694 | CUGCGGGAGGCCCUGGUCC | 3745 | GGACCAGGGCCUCCCGCAG |
| siRNA 1695 | 1695 | UGCGGGAGGCCCUGGUCCC | 3746 | GGGACCAGGGCCUCCCGCA |
| siRNA 1696 | 1696 | GCGGGAGGCCCUGGUCCCC | 3747 | GGGGACCAGGGCCUCCCGC |
| siRNA 1697 | 1697 | CGGGAGGCCCUGGUCCCCC | 3748 | GGGGGACCAGGGCCUCCCG |
| siRNA 1698 | 1698 | GGGAGGCCCUGGUCCCCCU | 3749 | AGGGGGACCAGGGCCUCCC |
| siRNA 1699 | 1699 | GGAGGCCCUGGUCCCCCUG | 3750 | CAGGGGGACCAGGGCCUCC |
| siRNA 1700 | 1700 | GAGGCCCUGGUCCCCCUGG | 3751 | CCAGGGGGACCAGGGCCUC |
| siRNA 1701 | 1701 | AGGCCCUGGUCCCCCUGGU | 3752 | ACCAGGGGGACCAGGGCCU |
| siRNA 1702 | 1702 | GGCCCUGGUCCCCCUGGUC | 3753 | GACCAGGGGGACCAGGGCC |
| siRNA 1703 | 1703 | GCCCUGGUCCCCCUGGUCG | 3754 | CGACCAGGGGGACCAGGGC |
| siRNA 1704 | 1704 | CCCUGGUCCCCCUGGUCGC | 3755 | GCGACCAGGGGGACCAGGG |
| siRNA 1705 | 1705 | CCUGGUCCCCCUGGUCGCC | 3756 | GGCGACCAGGGGGACCAGG |
| siRNA 1706 | 1706 | CUGGUCCCCCUGGUCGCCG | 3757 | CGGCGACCAGGGGGACCAG |
| siRNA 1707 | 1707 | UGGUCCCCCUGGUCGCCGA | 3758 | UCGGCGACCAGGGGGACCA |
| siRNA 1708 | 1708 | GGUCCCCCUGGUCGCCGAC | 3759 | GUCGGCGACCAGGGGGACC |
| siRNA 1709 | 1709 | GUCCCCCUGGUCGCCGACC | 3760 | GGUCGGCGACCAGGGGGAC |
| siRNA 1710 | 1710 | UCCCCCUGGUCGCCGACCA | 3761 | UGGUCGGCGACCAGGGGGA |
| siRNA 1711 | 1711 | CCCCCUGGUCGCCGACCAC | 3762 | GUGGUCGGCGACCAGGGGG |
| siRNA 1712 | 1712 | CCCCUGGUCGCCGACCACA | 3763 | UGUGGUCGGCGACCAGGGG |
| siRNA 1713 | 1713 | CCCUGGUCGCCGACCACAA | 3764 | UUGUGGUCGGCGACCAGGG |
| siRNA 1714 | 1714 | CCUGGUCGCCGACCACAAG | 3765 | CUUGUGGUCGGCGACCAGG |
| siRNA 1715 | 1715 | CUGGUCGCCGACCACAAGU | 3766 | ACUUGUGGUCGGCGACCAG |
| siRNA 1716 | 1716 | UGGUCGCCGACCACAAGUG | 3767 | CACUUGUGGUCGGCGACCA |
| siRNA 1717 | 1717 | GGUCGCCGACCACAAGUGC | 3768 | GCACUUGUGGUCGGCGACC |
| siRNA 1718 | 1718 | GUCGCCGACCACAAGUGCA | 3769 | UGCACUUGUGGUCGGCGAC |
| siRNA 1719 | 1719 | UCGCCGACCACAAGUGCAG | 3770 | CUGCACUUGUGGUCGGCGA |
| siRNA 1720 | 1720 | CGCCGACCACAAGUGCAGC | 3771 | GCUGCACUUGUGGUCGGCG |
| siRNA 1721 | 1721 | GCCGACCACAAGUGCAGCA | 3772 | UGCUGCACUUGUGGUCGGC |
| siRNA 1722 | 1722 | CCGACCACAAGUGCAGCAG | 3773 | CUGCUGCACUUGUGGUCGG |
| siRNA 1723 | 1723 | CGACCACAAGUGCAGCAGC | 3774 | GCUGCUGCACUUGUGGUCG |
| siRNA 1724 | 1724 | GACCACAAGUGCAGCAGCC | 3775 | GGCUGCUGCACUUGUGGUC |
| siRNA 1725 | 1725 | ACCACAAGUGCAGCAGCCC | 3776 | GGGCUGCUGCACUUGUGGU |
| siRNA 1726 | 1726 | CCACAAGUGCAGCAGCCCU | 3777 | AGGGCUGCUGCACUUGUGG |
| siRNA 1727 | 1727 | CACAAGUGCAGCAGCCCUG | 3778 | CAGGGCUGCUGCACUUGUG |
| siRNA 1728 | 1728 | ACAAGUGCAGCAGCCCUGA | 3779 | UCAGGGCUGCUGCACUUGU |
| siRNA 1729 | 1729 | CAAGUGCAGCAGCCCUGAG | 3780 | CUCAGGGCUGCUGCACUUG |
| siRNA 1730 | 1730 | AAGUGCAGCAGCCCUGAGG | 3781 | CCUCAGGGCUGCUGCACUU |
| siRNA 1731 | 1731 | AGUGCAGCAGCCCUGAGGU | 3782 | ACCUCAGGGCUGCUGCACU |
| siRNA 1732 | 1732 | GUGCAGCAGCCCUGAGGUC | 3783 | GACCUCAGGGCUGCUGCAC |
| siRNA 1733 | 1733 | UGCAGCAGCCCUGAGGUCU | 3784 | AGACCUCAGGGCUGCUGCA |
| siRNA 1734 | 1734 | GCAGCAGCCCUGAGGUCUA | 3785 | UAGACCUCAGGGCUGCUGC |
| siRNA 1735 | 1735 | CAGCAGCCCUGAGGUCUAC | 3786 | GUAGACCUCAGGGCUGCUG |
| siRNA 1736 | 1736 | AGCAGCCCUGAGGUCUACG | 3787 | CGUAGACCUCAGGGCUGCU |
| siRNA 1737 | 1737 | GCAGCCCUGAGGUCUACGG | 3788 | CCGUAGACCUCAGGGCUGC |
| siRNA 1738 | 1738 | CAGCCCUGAGGUCUACGGC | 3789 | GCCGUAGACCUCAGGGCUG |
| siRNA 1739 | 1739 | AGCCCUGAGGUCUACGGCG | 3790 | CGCCGUAGACCUCAGGGCU |
| siRNA 1740 | 1740 | GCCCUGAGGUCUACGGCGC | 3791 | GCGCCGUAGACCUCAGGGC |
| siRNA 1741 | 1741 | CCCUGAGGUCUACGGCGCC | 3792 | GGCGCCGUAGACCUCAGGG |
| siRNA 1742 | 1742 | CCUGAGGUCUACGGCGCCG | 3793 | CGGCGCCGUAGACCUCAGG |
| siRNA 1743 | 1743 | CUGAGGUCUACGGCGCCGA | 3794 | UCGGCGCCGUAGACCUCAG |
| siRNA 1744 | 1744 | UGAGGUCUACGGCGCCGAC | 3795 | GUCGGCGCCGUAGACCUCA |
| siRNA 1745 | 1745 | GAGGUCUACGGCGCCGACA | 3796 | UGUCGGCGCCGUAGACCUC |
| siRNA 1746 | 1746 | AGGUCUACGGCGCCGACAU | 3797 | AUGUCGGCGCCGUAGACCU |
| siRNA 1747 | 1747 | GGUCUACGGCGCCGACAUC | 3798 | GAUGUCGGCGCCGUAGACC |
| siRNA 1748 | 1748 | GUCUACGGCGCCGACAUCA | 3799 | UGAUGUCGGCGCCGUAGAC |
| siRNA 1749 | 1749 | UCUACGGCGCCGACAUCAG | 3800 | CUGAUGUCGGCGCCGUAGA |
| siRNA 1750 | 1750 | CUACGGCGCCGACAUCAGC | 3801 | GCUGAUGUCGGCGCCGUAG |
| siRNA 1751 | 1751 | UACGGCGCCGACAUCAGCC | 3802 | GGCUGAUGUCGGCGCCGUA |
| siRNA 1752 | 1752 | ACGGCGCCGACAUCAGCCC | 3803 | GGGCUGAUGUCGGCGCCGU |
| siRNA 1753 | 1753 | CGGCGCCGACAUCAGCCCC | 3804 | GGGGCUGAUGUCGGCGCCG |
| siRNA 1754 | 1754 | GGCGCCGACAUCAGCCCCA | 3805 | UGGGGCUGAUGUCGGCGCC |
| siRNA 1755 | 1755 | GCGCCGACAUCAGCCCCAA | 3806 | UUGGGGCUGAUGUCGGCGC |
| siRNA 1756 | 1756 | CGCCGACAUCAGCCCCAAC | 3807 | GUUGGGGCUGAUGUCGGCG |
| siRNA 1757 | 1757 | GCCGACAUCAGCCCCAACA | 3808 | UGUUGGGGCUGAUGUCGGC |
| siRNA 1758 | 1758 | CCGACAUCAGCCCCAACAU | 3809 | AUGUUGGGGCUGAUGUCGG |
| siRNA 1759 | 1759 | CGACAUCAGCCCCAACAUG | 3810 | CAUGUUGGGGCUGAUGUCG |
| siRNA 1760 | 1760 | GACAUCAGCCCCAACAUGC | 3811 | GCAUGUUGGGGCUGAUGUC |
| siRNA 1761 | 1761 | ACAUCAGCCCCAACAUGCU | 3812 | AGCAUGUUGGGGCUGAUGU |
| siRNA 1762 | 1762 | CAUCAGCCCCAACAUGCUC | 3813 | GAGCAUGUUGGGGCUGAUG |
| siRNA 1763 | 1763 | AUCAGCCCCAACAUGCUCU | 3814 | AGAGCAUGUUGGGGCUGAU |
| siRNA 1764 | 1764 | UCAGCCCCAACAUGCUCUG | 3815 | CAGAGCAUGUUGGGGCUGA |
| siRNA 1765 | 1765 | CAGCCCCAACAUGCUCUGU | 3816 | ACAGAGCAUGUUGGGGCUG |
| siRNA 1766 | 1766 | AGCCCCAACAUGCUCUGUG | 3817 | CACAGAGCAUGUUGGGGCU |
| siRNA 1767 | 1767 | GCCCCAACAUGCUCUGUGC | 3818 | GCACAGAGCAUGUUGGGGC |
| siRNA 1768 | 1768 | CCCCAACAUGCUCUGUGCC | 3819 | GGCACAGAGCAUGUUGGGG |
| siRNA 1769 | 1769 | CCCAACAUGCUCUGUGCCG | 3820 | CGGCACAGAGCAUGUUGGG |
| siRNA 1770 | 1770 | CCAACAUGCUCUGUGCCGG | 3821 | CCGGCACAGAGCAUGUUGG |
| siRNA 1771 | 1771 | CAACAUGCUCUGUGCCGGC | 3822 | GCCGGCACAGAGCAUGUUG |
| siRNA 1772 | 1772 | AACAUGCUCUGUGCCGGCU | 3823 | AGCCGGCACAGAGCAUGUU |
| siRNA 1773 | 1773 | ACAUGCUCUGUGCCGGCUA | 3824 | UAGCCGGCACAGAGCAUGU |
| siRNA 1774 | 1774 | CAUGCUCUGUGCCGGCUAC | 3825 | GUAGCCGGCACAGAGCAUG |
| sIRNA 1775 | 1775 | AUGCUCUGUGCCGGCUACU | 3826 | AGUAGCCGGCACAGAGCAU |
| siRNA 1776 | 1776 | UGCUCUGUGCCGGCUACUU | 3827 | AAGUAGCCGGCACAGAGCA |
| siRNA 1777 | 1777 | GCUCUGUGCCGGCUACUUC | 3828 | GAAGUAGCCGGCACAGAGC |
| siRNA 1778 | 1778 | CUCUGUGCCGGCUACUUCG | 3829 | CGAAGUAGCCGGCACAGAG |
| siRNA 1779 | 1779 | UCUGUGCCGGCUACUUCGA | 3830 | UCGAAGUAGCCGGCACAGA |
| siRNA 1780 | 1780 | CUGUGCCGGCUACUUCGAC | 3831 | GUCGAAGUAGCCGGCACAG |
| siRNA 1781 | 1781 | UGUGCCGGCUACUUCGACU | 3832 | AGUCGAAGUAGCCGGCACA |
| siRNA 1782 | 1782 | GUGCCGGCUACUUCGACUG | 3833 | CAGUCGAAGUAGCCGGCAC |
| siRNA 1783 | 1783 | UGCCGGCUACUUCGACUGC | 3834 | GCAGUCGAAGUAGCCGGCA |
| siRNA 1784 | 1784 | GCCGGCUACUUCGACUGCA | 3835 | UGCAGUCGAAGUAGCCGGC |
| siRNA 1785 | 1785 | CCGGCUACUUCGACUGCAA | 3836 | UUGCAGUCGAAGUAGCCGG |
| siRNA 1786 | 1786 | CGGCUACUUCGACUGCAAG | 3837 | CUUGCAGUCGAAGUAGCCG |
| siRNA 1787 | 1787 | GGCUACUUCGACUGCAAGU | 3838 | ACUUGCAGUCGAAGUAGCC |
| siRNA 1788 | 1788 | GCUACUUCGACUGCAAGUC | 3839 | GACUUGCAGUCGAAGUAGC |
| siRNA 1789 | 1789 | CUACUUCGACUGCAAGUCC | 3840 | GGACUUGCAGUCGAAGUAG |
| siRNA 1790 | 1790 | UACUUCGACUGCAAGUCCG | 3841 | CGGACUUGCAGUCGAAGUA |
| siRNA 1791 | 1791 | ACUUCGACUGCAAGUCCGA | 3842 | UCGGACUUGCAGUCGAAGU |
| siRNA 1792 | 1792 | CUUCGACUGCAAGUCCGAC | 3843 | GUCGGACUUGCAGUCGAAG |
| siRNA 1793 | 1793 | UUCGACUGCAAGUCCGACG | 3844 | CGUCGGACUUGCAGUCGAA |
| siRNA 1794 | 1794 | UCGACUGCAAGUCCGACGC | 3845 | GCGUCGGACUUGCAGUCGA |
| siRNA 1795 | 1795 | CGACUGCAAGUCCGACGCC | 3846 | GGCGUCGGACUUGCAGUCG |
| siRNA 1796 | 1796 | GACUGCAAGUCCGACGCCU | 3847 | AGGCGUCGGACUUGCAGUC |
| siRNA 1797 | 1797 | ACUGCAAGUCCGACGCCUG | 3848 | CAGGCGUCGGACUUGCAGU |
| siRNA 1798 | 1798 | CUGCAAGUCCGACGCCUGC | 3849 | GCAGGCGUCGGACUUGCAG |
| SiRNA 1799 | 1799 | UGCAAGUCCGACGCCUGCC | 3850 | GGCAGGCGUCGGACUUGCA |
| siRNA 1800 | 1800 | GCAAGUCCGACGCCUGCCA | 3851 | UGGCAGGCGUCGGACUUGC |
| siRNA 1801 | 1801 | CAAGUCCGACGCCUGCCAG | 3852 | CUGGCAGGCGUCGGACUUG |
| siRNA 1802 | 1802 | AAGUCCGACGCCUGCCAGG | 3853 | CCUGGCAGGCGUCGGACUU |
| siRNA 1803 | 1803 | AGUCCGACGCCUGCCAGGG | 3854 | CCCUGGCAGGCGUCGGACU |
| siRNA 1804 | 1804 | GUCCGACGCCUGCCAGGGG | 3855 | CCCCUGGCAGGCGUCGGAC |
| siRNA 1805 | 1805 | UCCGACGCCUGCCAGGGGG | 3856 | CCCCCUGGCAGGCGUCGGA |
| siRNA 1806 | 1806 | CCGACGCCUGCCAGGGGGA | 3857 | UCCCCCUGGCAGGCGUCGG |
| siRNA 1807 | 1807 | CGACGCCUGCCAGGGGGAC | 3858 | GUCCCCCUGGCAGGCGUCG |
| siRNA 1808 | 1808 | GACGCCUGCCAGGGGGACU | 3859 | AGUCCCCCUGGCAGGCGUC |
| siRNA 1809 | 1809 | ACGCCUGCCAGGGGGACUC | 3860 | GAGUCCCCCUGGCAGGCGU |
| siRNA 1810 | 1810 | CGCCUGCCAGGGGGACUCA | 3861 | UGAGUCCCCCUGGCAGGCG |
| siRNA 1811 | 1811 | GCCUGCCAGGGGGACUCAG | 3862 | CUGAGUCCCCCUGGCAGGC |
| siRNA 1812 | 1812 | CCUGCCAGGGGGACUCAGG | 3863 | CCUGAGUCCCCCUGGCAGG |
| siRNA 1813 | 1813 | CUGCCAGGGGGACUCAGGG | 3864 | CCCUGAGUCCCCCUGGCAG |
| siRNA 1814 | 1814 | UGCCAGGGGGACUCAGGGG | 3865 | CCCCUGAGUCCCCCUGGCA |
| siRNA 1815 | 1815 | GCCAGGGGGACUCAGGGGG | 3866 | CCCCCUGAGUCCCCCUGGC |
| siRNA 1816 | 1816 | CCAGGGGGACUCAGGGGGG | 3867 | CCCCCCUGAGUCCCCCUGG |
| siRNA 1817 | 1817 | CAGGGGGACUCAGGGGGGC | 3868 | GCCCCCCUGAGUCCCCCUG |
| siRNA 1818 | 1818 | AGGGGGACUCAGGGGGGCC | 3869 | GGCCCCCCUGAGUCCCCCU |
| siRNA 1819 | 1819 | GGGGGACUCAGGGGGGCCC | 3870 | GGGCCCCCCUGAGUCCCCC |
| siRNA 1820 | 1820 | GGGGACUCAGGGGGGCCCC | 3871 | GGGGCCCCCCUGAGUCCCC |
| siRNA 1821 | 1821 | GGGACUCAGGGGGGCCCCU | 3872 | AGGGGCCCCCCUGAGUCCC |
| siRNA 1822 | 1822 | GGACUCAGGGGGGCCCCUG | 3873 | CAGGGGCCCCCCUGAGUCC |
| siRNA 1823 | 1823 | GACUCAGGGGGGCCCCUGG | 3874 | CCAGGGGCCCCCCUGAGUC |
| siRNA 1824 | 1824 | ACUCAGGGGGGCCCCUGGC | 3875 | GCCAGGGGCCCCCCUGAGU |
| siRNA 1825 | 1825 | CUCAGGGGGGCCCCUGGCC | 3876 | GGCCAGGGGCCCCCCUGAG |
| siRNA 1826 | 1826 | UCAGGGGGGCCCCUGGCCU | 3877 | AGGCCAGGGGCCCCCCUGA |
| siRNA 1827 | 1827 | CAGGGGGGCCCCUGGCCUG | 3878 | CAGGCCAGGGGCCCCCCUG |
| siRNA 1828 | 1828 | AGGGGGGCCCCUGGCCUGC | 3879 | GCAGGCCAGGGGCCCCCCU |
| siRNA 1829 | 1829 | GGGGGGCCCCUGGCCUGCG | 3880 | CGCAGGCCAGGGGCCCCCC |
| siRNA 1830 | 1830 | GGGGGCCCCUGGCCUGCGA | 3881 | UCGCAGGCCAGGGGCCCCC |
| siRNA 1831 | 1831 | GGGGCCCCUGGCCUGCGAG | 3882 | CUCGCAGGCCAGGGGCCCC |
| siRNA 1832 | 1832 | GGGCCCCUGGCCUGCGAGA | 3883 | UCUCGCAGGCCAGGGGCCC |
| siRNA 1833 | 1833 | GGCCCCUGGCCUGCGAGAA | 3884 | UUCUCGCAGGCCAGGGGCC |
| siRNA 1834 | 1834 | GCCCCUGGCCUGCGAGAAG | 3885 | CUUCUCGCAGGCCAGGGGC |
| siRNA 1835 | 1835 | CCCCUGGCCUGCGAGAAGA | 3886 | UCUUCUCGCAGGCCAGGGG |
| siRNA 1836 | 1836 | CCCUGGCCUGCGAGAAGAA | 3887 | UUCUUCUCGCAGGCCAGGG |
| siRNA 1837 | 1837 | CCUGGCCUGCGAGAAGAAC | 3888 | GUUCUUCUCGCAGGCCAGG |
| siRNA 1838 | 1838 | CUGGCCUGCGAGAAGAACG | 3889 | CGUUCUUCUCGCAGGCCAG |
| siRNA 1839 | 1839 | UGGCCUGCGAGAAGAACGG | 3890 | CCGUUCUUCUCGCAGGCCA |
| siRNA 1840 | 1840 | GGCCUGCGAGAAGAACGGC | 3891 | GCCGUUCUUCUCGCAGGCC |
| siRNA 1841 | 1841 | GCCUGCGAGAAGAACGGCG | 3892 | CGCCGUUCUUCUCGCAGGC |
| siRNA 1842 | 1842 | CCUGCGAGAAGAACGGCGU | 3893 | ACGCCGUUCUUCUCGCAGG |
| siRNA 1843 | 1843 | CUGCGAGAAGAACGGCGUG | 3894 | CACGCCGUUCUUCUCGCAG |
| siRNA 1844 | 1844 | UGCGAGAAGAACGGCGUGG | 3895 | CCACGCCGUUCUUCUCGCA |
| siRNA 1845 | 1845 | GCGAGAAGAACGGCGUGGC | 3896 | GCCACGCCGUUCUUCUCGC |
| siRNA 1846 | 1846 | CGAGAAGAACGGCGUGGCU | 3897 | AGCCACGCCGUUCUUCUCG |
| siRNA 1847 | 1847 | GAGAAGAACGGCGUGGCUU | 3898 | AAGCCACGCCGUUCUUCUC |
| siRNA 1848 | 1848 | AGAAGAACGGCGUGGCUUA | 3899 | UAAGCCACGCCGUUCUUCU |
| siRNA 1849 | 1849 | GAAGAACGGCGUGGCUUAC | 3900 | GUAAGCCACGCCGUUCUUC |
| siRNA 1850 | 1850 | AAGAACGGCGUGGCUUACC | 3901 | GGUAAGCCACGCCGUUCUU |
| siRNA 1851 | 1851 | AGAACGGCGUGGCUUACCU | 3902 | AGGUAAGCCACGCCGUUCU |
| siRNA 1852 | 1852 | GAACGGCGUGGCUUACCUC | 3903 | GAGGUAAGCCACGCCGUUC |
| siRNA 1853 | 1853 | AACGGCGUGGCUUACCUCU | 3904 | AGAGGUAAGCCACGCCGUU |
| siRNA 1854 | 1854 | ACGGCGUGGCUUACCUCUA | 3905 | UAGAGGUAAGCCACGCCGU |
| siRNA 1855 | 1855 | CGGCGUGGCUUACCUCUAC | 3906 | GUAGAGGUAAGCCACGCCG |
| siRNA 1856 | 1856 | GGCGUGGCUUACCUCUACG | 3907 | CGUAGAGGUAAGCCACGCC |
| siRNA 1857 | 1857 | GCGUGGCUUACCUCUACGG | 3908 | CCGUAGAGGUAAGCCACGC |
| siRNA 1858 | 1858 | CGUGGCUUACCUCUACGGC | 3909 | GCCGUAGAGGUAAGCCACG |
| siRNA 1859 | 1859 | GUGGCUUACCUCUACGGCA | 3910 | UGCCGUAGAGGUAAGCCAC |
| siRNA 1860 | 1860 | UGGCUUACCUCUACGGCAU | 3911 | AUGCCGUAGAGGUAAGCCA |
| siRNA 1861 | 1861 | GGCUUACCUCUACGGCAUC | 3912 | GAUGCCGUAGAGGUAAGCC |
| siRNA 1862 | 1862 | GCUUACCUCUACGGCAUCA | 3913 | UGAUGCCGUAGAGGUAAGC |
| siRNA 1863 | 1863 | CUUACCUCUACGGCAUCAU | 3914 | AUGAUGCCGUAGAGGUAAG |
| siRNA 1864 | 1864 | UUACCUCUACGGCAUCAUC | 3915 | GAUGAUGCCGUAGAGGUAA |
| siRNA 1865 | 1865 | UACCUCUACGGCAUCAUCA | 3916 | UGAUGAUGCCGUAGAGGUA |
| siRNA 1866 | 1866 | ACCUCUACGGCAUCAUCAG | 3917 | CUGAUGAUGCCGUAGAGGU |
| siRNA 1867 | 1867 | CCUCUACGGCAUCAUCAGC | 3918 | GCUGAUGAUGCCGUAGAGG |
| SiRNA 1868 | 1868 | CUCUACGGCAUCAUCAGCU | 3919 | AGCUGAUGAUGCCGUAGAG |
| siRNA 1869 | 1869 | UCUACGGCAUCAUCAGCUG | 3920 | CAGCUGAUGAUGCCGUAGA |
| siRNA 1870 | 1870 | CUACGGCAUCAUCAGCUGG | 3921 | CCAGCUGAUGAUGCCGUAG |
| siRNA 1871 | 1871 | UACGGCAUCAUCAGCUGGG | 3922 | CCCAGCUGAUGAUGCCGUA |
| siRNA 1872 | 1872 | ACGGCAUCAUCAGCUGGGG | 3923 | CCCCAGCUGAUGAUGCCGU |
| siRNA 1873 | 1873 | CGGCAUCAUCAGCUGGGGU | 3924 | ACCCCAGCUGAUGAUGCCG |
| siRNA 1874 | 1874 | GGCAUCAUCAGCUGGGGUG | 3925 | CACCCCAGCUGAUGAUGCC |
| siRNA 1875 | 1875 | GCAUCAUCAGCUGGGGUGA | 3926 | UCACCCCAGCUGAUGAUGC |
| siRNA 1876 | 1876 | CAUCAUCAGCUGGGGUGAC | 3927 | GUCACCCCAGCUGAUGAUG |
| siRNA 1877 | 1877 | AUCAUCAGCUGGGGUGACG | 3928 | CGUCACCCCAGCUGAUGAU |
| siRNA 1878 | 1878 | UCAUCAGCUGGGGUGACGG | 3929 | CCGUCACCCCAGCUGAUGA |
| siRNA 1879 | 1879 | CAUCAGCUGGGGUGACGGC | 3930 | GCCGUCACCCCAGCUGAUG |
| siRNA 1880 | 1880 | AUCAGCUGGGGUGACGGCU | 3931 | AGCCGUCACCCCAGCUGAU |
| siRNA 1881 | 1881 | UCAGCUGGGGUGACGGCUG | 3932 | CAGCCGUCACCCCAGCUGA |
| siRNA 1882 | 1882 | CAGCUGGGGUGACGGCUGC | 3933 | GCAGCCGUCACCCCAGCUG |
| siRNA 1883 | 1883 | AGCUGGGGUGACGGCUGCG | 3934 | CGCAGCCGUCACCCCAGCU |
| siRNA 1884 | 1884 | GCUGGGGUGACGGCUGCGG | 3935 | CCGCAGCCGUCACCCCAGC |
| siRNA 1885 | 1885 | CUGGGGUGACGGCUGCGGG | 3936 | CCCGCAGCCGUCACCCCAG |
| siRNA 1886 | 1886 | UGGGGUGACGGCUGCGGGC | 3937 | GCCCGCAGCCGUCACCCCA |
| siRNA 1887 | 1887 | GGGGUGACGGCUGCGGGCG | 3938 | CGCCCGCAGCCGUCACCCC |
| siRNA 1888 | 1888 | GGGUGACGGCUGCGGGCGG | 3939 | CCGCCCGCAGCCGUCACCC |
| siRNA 1889 | 1889 | GGUGACGGCUGCGGGCGGC | 3940 | GCCGCCCGCAGCCGUCACC |
| siRNA 1890 | 1890 | GUGACGGCUGCGGGCGGCU | 3941 | AGCCGCCCGCAGCCGUCAC |
| siRNA 1891 | 1891 | UGACGGCUGCGGGCGGCUC | 3942 | GAGCCGCCCGCAGCCGUCA |
| siRNA 1892 | 1892 | GACGGCUGCGGGCGGCUCC | 3943 | GGAGCCGCCCGCAGCCGUC |
| siRNA 1893 | 1893 | ACGGCUGCGGGCGGCUCCA | 3944 | UGGAGCCGCCCGCAGCCGU |
| siRNA 1894 | 1894 | CGGCUGCGGGCGGCUCCAC | 3945 | GUGGAGCCGCCCGCAGCCG |
| siRNA 1895 | 1895 | GGCUGCGGGCGGCUCCACA | 3946 | UGUGGAGCCGCCCGCAGCC |
| siRNA 1896 | 1896 | GCUGCGGGCGGCUCCACAA | 3947 | UUGUGGAGCCGCCCGCAGC |
| siRNA 1897 | 1897 | CUGCGGGCGGCUCCACAAG | 3948 | CUUGUGGAGCCGCCCGCAG |
| siRNA 1898 | 1898 | UGCGGGCGGCUCCACAAGC | 3949 | GCUUGUGGAGCCGCCCGCA |
| siRNA 1899 | 1899 | GCGGGCGGCUCCACAAGCC | 3950 | GGCUUGUGGAGCCGCCCGC |
| siRNA 1900 | 1900 | CGGGCGGCUCCACAAGCCG | 3951 | CGGCUUGUGGAGCCGCCCG |
| siRNA 1901 | 1901 | GGGCGGCUCCACAAGCCGG | 3952 | CCGGCUUGUGGAGCCGCCC |
| SiRNA 1902 | 1902 | GGCGGCUCCACAAGCCGGG | 3953 | CCCGGCUUGUGGAGCCGCC |
| siRNA 1903 | 1903 | GCGGCUCCACAAGCCGGGG | 3954 | CCCCGGCUUGUGGAGCCGC |
| siRNA 1904 | 1904 | CGGCUCCACAAGCCGGGGG | 3955 | CCCCCGGCUUGUGGAGCCG |
| siRNA 1905 | 1905 | GGCUCCACAAGCCGGGGGU | 3956 | ACCCCCGGCUUGUGGAGCC |
| siRNA 1906 | 1906 | GCUCCACAAGCCGGGGGUC | 3957 | GACCCCCGGCUUGUGGAGC |
| siRNA 1907 | 1907 | CUCCACAAGCCGGGGGUCU | 3958 | AGACCCCCGGCUUGUGGAG |
| siRNA 1908 | 1908 | UCCACAAGCCGGGGGUCUA | 3959 | UAGACCCCCGGCUUGUGGA |
| siRNA 1909 | 1909 | CCACAAGCCGGGGGUCUAC | 3960 | GUAGACCCCCGGCUUGUGG |
| siRNA 1910 | 1910 | CACAAGCCGGGGGUCUACA | 3961 | UGUAGACCCCCGGCUUGUG |
| siRNA 1911 | 1911 | ACAAGCCGGGGGUCUACAC | 3962 | GUGUAGACCCCCGGCUUGU |
| siRNA 1912 | 1912 | CAAGCCGGGGGUCUACACC | 3963 | GGUGUAGACCCCCGGCUUG |
| siRNA 1913 | 1913 | AAGCCGGGGGUCUACACCC | 3964 | GGGUGUAGACCCCCGGCUU |
| siRNA 1914 | 1914 | AGCCGGGGGUCUACACCCG | 3965 | CGGGUGUAGACCCCCGGCU |
| siRNA 1915 | 1915 | GCCGGGGGUCUACACCCGC | 3966 | GCGGGUGUAGACCCCCGGC |
| siRNA 1916 | 1916 | CCGGGGGUCUACACCCGCG | 3967 | CGCGGGUGUAGACCCCCGG |
| siRNA 1917 | 1917 | CGGGGGUCUACACCCGCGU | 3968 | ACGCGGGUGUAGACCCCCG |
| siRNA 1918 | 1918 | GGGGGUCUACACCCGCGUG | 3969 | CACGCGGGUGUAGACCCCC |
| siRNA 1919 | 1919 | GGGGUCUACACCCGCGUGG | 3970 | CCACGCGGGUGUAGACCCC |
| siRNA 1920 | 1920 | GGGUCUACACCCGCGUGGC | 3971 | GCCACGCGGGUGUAGACCC |
| siRNA 1921 | 1921 | GGUCUACACCCGCGUGGCC | 3972 | GGCCACGCGGGUGUAGACC |
| siRNA 1922 | 1922 | GUCUACACCCGCGUGGCCA | 3973 | UGGCCACGCGGGUGUAGAC |
| siRNA 1923 | 1923 | UCUACACCCGCGUGGCCAA | 3974 | UUGGCCACGCGGGUGUAGA |
| siRNA 1924 | 1924 | CUACACCCGCGUGGCCAAC | 3975 | GUUGGCCACGCGGGUGUAG |
| siRNA 1925 | 1925 | UACACCCGCGUGGCCAACU | 3976 | AGUUGGCCACGCGGGUGUA |
| siRNA 1926 | 1926 | ACACCCGCGUGGCCAACUA | 3977 | UAGUUGGCCACGCGGGUGU |
| siRNA 1927 | 1927 | CACCCGCGUGGCCAACUAU | 3978 | AUAGUUGGCCACGCGGGUG |
| siRNA 1928 | 1928 | ACCCGCGUGGCCAACUAUG | 3979 | CAUAGUUGGCCACGCGGGU |
| siRNA 1929 | 1929 | CCCGCGUGGCCAACUAUGU | 3980 | ACAUAGUUGGCCACGCGGG |
| siRNA 1930 | 1930 | CCGCGUGGCCAACUAUGUG | 3981 | CACAUAGUUGGCCACGCGG |
| siRNA 1931 | 1931 | CGCGUGGCCAACUAUGUGG | 3982 | CCACAUAGUUGGCCACGCG |
| siRNA 1932 | 1932 | GCGUGGCCAACUAUGUGGA | 3983 | UCCACAUAGUUGGCCACGC |
| siRNA 1933 | 1933 | CGUGGCCAACUAUGUGGAC | 3984 | GUCCACAUAGUUGGCCACG |
| siRNA 1934 | 1934 | GUGGCCAACUAUGUGGACU | 3985 | AGUCCACAUAGUUGGCCAC |
| siRNA 1935 | 1935 | UGGCCAACUAUGUGGACUG | 3986 | CAGUCCACAUAGUUGGCCA |
| siRNA 1936 | 1936 | GGCCAACUAUGUGGACUGG | 3987 | CCAGUCCACAUAGUUGGCC |
| siRNA 1937 | 1937 | GCCAACUAUGUGGACUGGA | 3988 | UCCAGUCCACAUAGUUGGC |
| siRNA 1938 | 1938 | CCAACUAUGUGGACUGGAU | 3989 | AUCCAGUCCACAUAGUUGG |
| siRNA 1939 | 1939 | CAACUAUGUGGACUGGAUC | 3990 | GAUCCAGUCCACAUAGUUG |
| SiRNA 1940 | 1940 | AACUAUGUGGACUGGAUCA | 3991 | UGAUCCAGUCCACAUAGUU |
| siRNA 1941 | 1941 | ACUAUGUGGACUGGAUCAA | 3992 | UUGAUCCAGUCCACAUAGU |
| siRNA 1942 | 1942 | CUAUGUGGACUGGAUCAAC | 3993 | GUUGAUCCAGUCCACAUAG |
| siRNA 1943 | 1943 | UAUGUGGACUGGAUCAACG | 3994 | CGUUGAUCCAGUCCACAUA |
| siRNA 1944 | 1944 | AUGUGGACUGGAUCAACGA | 3995 | UCGUUGAUCCAGUCCACAU |
| siRNA 1945 | 1945 | UGUGGACUGGAUCAACGAC | 3996 | GUCGUUGAUCCAGUCCACA |
| siRNA 1946 | 1946 | GUGGACUGGAUCAACGACC | 3997 | GGUCGUUGAUCCAGUCCAC |
| siRNA 1947 | 1947 | UGGACUGGAUCAACGACCG | 3998 | CGGUCGUUGAUCCAGUCCA |
| siRNA 1948 | 1948 | GGACUGGAUCAACGACCGG | 3999 | CCGGUCGUUGAUCCAGUCC |
| siRNA 1949 | 1949 | GACUGGAUCAACGACCGGA | 4000 | UCCGGUCGUUGAUCCAGUC |
| siRNA 1950 | 1950 | ACUGGAUCAACGACCGGAU | 4001 | AUCCGGUCGUUGAUCCAGU |
| siRNA 1951 | 1951 | CUGGAUCAACGACCGGAUA | 4002 | UAUCCGGUCGUUGAUCCAG |
| siRNA 1952 | 1952 | UGGAUCAACGACCGGAUAC | 4003 | GUAUCCGGUCGUUGAUCCA |
| siRNA 1953 | 1953 | GGAUCAACGACCGGAUACG | 4004 | CGUAUCCGGUCGUUGAUCC |
| SiRNA 1954 | 1954 | GAUCAACGACCGGAUACGG | 4005 | CCGUAUCCGGUCGUUGAUC |
| siRNA 1955 | 1955 | AUCAACGACCGGAUACGGC | 4006 | GCCGUAUCCGGUCGUUGAU |
| siRNA 1956 | 1956 | UCAACGACCGGAUACGGCC | 4007 | GGCCGUAUCCGGUCGUUGA |
| siRNA 1957 | 1957 | CAACGACCGGAUACGGCCU | 4008 | AGGCCGUAUCCGGUCGUUG |
| siRNA 1958 | 1958 | AACGACCGGAUACGGCCUC | 4009 | GAGGCCGUAUCCGGUCGUU |
| siRNA 1959 | 1959 | ACGACCGGAUACGGCCUCC | 4010 | GGAGGCCGUAUCCGGUCGU |
| siRNA 1960 | 1960 | CGACCGGAUACGGCCUCCC | 4011 | GGGAGGCCGUAUCCGGUCG |
| siRNA 1961 | 1961 | GACCGGAUACGGCCUCCCA | 4012 | UGGGAGGCCGUAUCCGGUC |
| siRNA 1962 | 1962 | ACCGGAUACGGCCUCCCAG | 4013 | CUGGGAGGCCGUAUCCGGU |
| siRNA 1963 | 1963 | CCGGAUACGGCCUCCCAGG | 4014 | CCUGGGAGGCCGUAUCCGG |
| siRNA 1964 | 1964 | CGGAUACGGCCUCCCAGGC | 4015 | GCCUGGGAGGCCGUAUCCG |
| siRNA 1965 | 1965 | GGAUACGGCCUCCCAGGCG | 4016 | CGCCUGGGAGGCCGUAUCC |
| siRNA 1966 | 1966 | GAUACGGCCUCCCAGGCGG | 4017 | CCGCCUGGGAGGCCGUAUC |
| siRNA 1967 | 1967 | AUACGGCCUCCCAGGCGGC | 4018 | GCCGCCUGGGAGGCCGUAU |
| siRNA 1968 | 1968 | UACGGCCUCCCAGGCGGCU | 4019 | AGCCGCCUGGGAGGCCGUA |
| siRNA 1969 | 1969 | ACGGCCUCCCAGGCGGCUU | 4020 | AAGCCGCCUGGGAGGCCGU |
| siRNA 1970 | 1970 | CGGCCUCCCAGGCGGCUUG | 4021 | CAAGCCGCCUGGGAGGCCG |
| siRNA 1971 | 1971 | GGCCUCCCAGGCGGCUUGU | 4022 | ACAAGCCGCCUGGGAGGCC |
| siRNA 1972 | 1972 | GCCUCCCAGGCGGCUUGUG | 4023 | CACAAGCCGCCUGGGAGGC |
| siRNA 1973 | 1973 | CCUCCCAGGCGGCUUGUGG | 4024 | CCACAAGCCGCCUGGGAGG |
| siRNA 1974 | 1974 | CUCCCAGGCGGCUUGUGGC | 4025 | GCCACAAGCCGCCUGGGAG |
| siRNA 1975 | 1975 | UCCCAGGCGGCUUGUGGCU | 4026 | AGCCACAAGCCGCCUGGGA |
| siRNA 1976 | 1976 | CCCAGGCGGCUUGUGGCUC | 4027 | GAGCCACAAGCCGCCUGGG |
| siRNA 1977 | 1977 | CCAGGCGGCUUGUGGCUCC | 4028 | GGAGCCACAAGCCGCCUGG |
| siRNA 1978 | 1978 | CAGGCGGCUUGUGGCUCCC | 4029 | GGGAGCCACAAGCCGCCUG |
| siRNA 1979 | 1979 | AGGCGGCUUGUGGCUCCCU | 4030 | AGGGAGCCACAAGCCGCCU |
| siRNA 1980 | 1980 | GGCGGCUUGUGGCUCCCUC | 4031 | GAGGGAGCCACAAGCCGCC |
| siRNA 1981 | 1981 | GCGGCUUGUGGCUCCCUCC | 4032 | GGAGGGAGCCACAAGCCGC |
| siRNA 1982 | 1982 | CGGCUUGUGGCUCCCUCCU | 4033 | AGGAGGGAGCCACAAGCCG |
| siRNA 1983 | 1983 | GGCUUGUGGCUCCCUCCUG | 4034 | CAGGAGGGAGCCACAAGCC |
| SiRNA 1984 | 1984 | GCUUGUGGCUCCCUCCUGA | 4035 | UCAGGAGGGAGCCACAAGC |
| siRNA 1985 | 1985 | CUUGUGGCUCCCUCCUGAC | 4036 | GUCAGGAGGGAGCCACAAG |
| siRNA 1986 | 1986 | UUGUGGCUCCCUCCUGACC | 4037 | GGUCAGGAGGGAGCCACAA |
| siRNA 1987 | 1987 | UGUGGCUCCCUCCUGACCC | 4038 | GGGUCAGGAGGGAGCCACA |
| siRNA 1988 | 1988 | GUGGCUCCCUCCUGACCCU | 4039 | AGGGUCAGGAGGGAGCCAC |
| siRNA 1989 | 1989 | UGGCUCCCUCCUGACCCUC | 4040 | GAGGGUCAGGAGGGAGCCA |
| siRNA 1990 | 1990 | GGCUCCCUCCUGACCCUCC | 4041 | GGAGGGUCAGGAGGGAGCC |
| siRNA 1991 | 1991 | GCUCCCUCCUGACCCUCCA | 4042 | UGGAGGGUCAGGAGGGAGC |
| siRNA 1992 | 1992 | CUCCCUCCUGACCCUCCAG | 4043 | CUGGAGGGUCAGGAGGGAG |
| siRNA 1993 | 1993 | UCCCUCCUGACCCUCCAGC | 4044 | GCUGGAGGGUCAGGAGGGA |
| siRNA 1994 | 1994 | CCCUCCUGACCCUCCAGCG | 4045 | CGCUGGAGGGUCAGGAGGG |
| siRNA 1995 | 1995 | CCUCCUGACCCUCCAGCGG | 4046 | CCGCUGGAGGGUCAGGAGG |
| siRNA 1996 | 1996 | CUCCUGACCCUCCAGCGGG | 4047 | CCCGCUGGAGGGUCAGGAG |
| siRNA 1997 | 1997 | UCCUGACCCUCCAGCGGGA | 4048 | UCCCGCUGGAGGGUCAGGA |
| siRNA 1998 | 1998 | CCUGACCCUCCAGCGGGAC | 4049 | GUCCCGCUGGAGGGUCAGG |
| siRNA 1999 | 1999 | CUGACCCUCCAGCGGGACA | 4050 | UGUCCCGCUGGAGGGUCAG |
| siRNA 2000 | 2000 | UGACCCUCCAGCGGGACAC | 4051 | GUGUCCCGCUGGAGGGUCA |
| siRNA 2001 | 2001 | GACCCUCCAGCGGGACACC | 4052 | GGUGUCCCGCUGGAGGGUC |
| siRNA 2002 | 2002 | ACCCUCCAGCGGGACACCC | 4053 | GGGUGUCCCGCUGGAGGGU |
| siRNA 2003 | 2003 | CCCUCCAGCGGGACACCCU | 4054 | AGGGUGUCCCGCUGGAGGG |
| siRNA 2004 | 2004 | CCUCCAGCGGGACACCCUG | 4055 | CAGGGUGUCCCGCUGGAGG |
| siRNA 2005 | 2005 | CUCCAGCGGGACACCCUGG | 4056 | CCAGGGUGUCCCGCUGGAG |
| siRNA 2006 | 2006 | UCCAGCGGGACACCCUGGU | 4057 | ACCAGGGUGUCCCGCUGGA |
| siRNA 2007 | 2007 | CCAGCGGGACACCCUGGUU | 4058 | AACCAGGGUGUCCCGCUGG |
| siRNA 2008 | 2008 | CAGCGGGACACCCUGGUUC | 4059 | GAACCAGGGUGUCCCGCUG |
| siRNA 2009 | 2009 | AGCGGGACACCCUGGUUCC | 4060 | GGAACCAGGGUGUCCCGCU |
| siRNA 2010 | 2010 | GCGGGACACCCUGGUUCCC | 4061 | GGGAACCAGGGUGUCCCGC |
| siRNA 2011 | 2011 | CGGGACACCCUGGUUCCCA | 4062 | UGGGAACCAGGGUGUCCCG |
| siRNA 2012 | 2012 | GGGACACCCUGGUUCCCAC | 4063 | GUGGGAACCAGGGUGUCCC |
| siRNA 2013 | 2013 | GGACACCCUGGUUCCCACC | 4064 | GGUGGGAACCAGGGUGUCC |
| siRNA 2014 | 2014 | GACACCCUGGUUCCCACCA | 4065 | UGGUGGGAACCAGGGUGUC |
| siRNA 2015 | 2015 | ACACCCUGGUUCCCACCAU | 4066 | AUGGUGGGAACCAGGGUGU |
| siRNA 2016 | 2016 | CACCCUGGUUCCCACCAUU | 4067 | AAUGGUGGGAACCAGGGUG |
| siRNA 2017 | 2017 | ACCCUGGUUCCCACCAUUC | 4068 | GAAUGGUGGGAACCAGGGU |
| siRNA 2018 | 2018 | CCCUGGUUCCCACCAUUCC | 4069 | GGAAUGGUGGGAACCAGGG |
| siRNA 2019 | 2019 | CCUGGUUCCCACCAUUCCC | 4070 | GGGAAUGGUGGGAACCAGG |
| siRNA 2020 | 2020 | CUGGUUCCCACCAUUCCCU | 4071 | AGGGAAUGGUGGGAACCAG |
| siRNA 2021 | 2021 | UGGUUCCCACCAUUCCCUG | 4072 | CAGGGAAUGGUGGGAACCA |
| siRNA 2022 | 2022 | GGUUCCCACCAUUCCCUGC | 4073 | GCAGGGAAUGGUGGGAACC |
| siRNA 2023 | 2023 | GUUCCCACCAUUCCCUGCC | 4074 | GGCAGGGAAUGGUGGGAAC |
| siRNA 2024 | 2024 | UUCCCACCAUUCCCUGCCU | 4075 | AGGCAGGGAAUGGUGGGAA |
| siRNA 2025 | 2025 | UCCCACCAUUCCCUGCCUU | 4076 | AAGGCAGGGAAUGGUGGGA |
| siRNA 2026 | 2026 | CCCACCAUUCCCUGCCUUG | 4077 | CAAGGCAGGGAAUGGUGGG |
| siRNA 2027 | 2027 | CCACCAUUCCCUGCCUUGC | 4078 | GCAAGGCAGGGAAUGGUGG |
| siRNA 2028 | 2028 | CACCAUUCCCUGCCUUGCU | 4079 | AGCAAGGCAGGGAAUGGUG |
| siRNA 2029 | 2029 | ACCAUUCCCUGCCUUGCUG | 4080 | CAGCAAGGCAGGGAAUGGU |
| siRNA 2030 | 2030 | CCAUUCCCUGCCUUGCUGA | 4081 | UCAGCAAGGCAGGGAAUGG |
| siRNA 2031 | 2031 | CAUUCCCUGCCUUGCUGAC | 4082 | GUCAGCAAGGCAGGGAAUG |
| siRNA 2032 | 2032 | AUUCCCUGCCUUGCUGACA | 4083 | UGUCAGCAAGGCAGGGAAU |
| siRNA 2033 | 2033 | UUCCCUGCCUUGCUGACAA | 4084 | UUGUCAGCAAGGCAGGGAA |
| siRNA 2034 | 2034 | UCCCUGCCUUGCUGACAAU | 4085 | AUUGUCAGCAAGGCAGGGA |
| siRNA 2035 | 2035 | CCCUGCCUUGCUGACAAUA | 4086 | UAUUGUCAGCAAGGCAGGG |
| siRNA 2036 | 2036 | CCUGCCUUGCUGACAAUAA | 4087 | UUAUUGUCAGCAAGGCAGG |
| siRNA 2037 | 2037 | CUGCCUUGCUGACAAUAAA | 4088 | UUUAUUGUCAGCAAGGCAG |
| siRNA 2038 | 2038 | UGCCUUGCUGACAAUAAAG | 4089 | CUUUAUUGUCAGCAAGGCA |
| siRNA 2039 | 2039 | GCCUUGCUGACAAUAAAGA | 4090 | UCUUUAUUGUCAGCAAGGC |
| siRNA 2040 | 2040 | CCUUGCUGACAAUAAAGAU | 4091 | AUCUUUAUUGUCAGCAAGG |
| siRNA 2041 | 2041 | CUUGCUGACAAUAAAGAUA | 4092 | UAUCUUUAUUGUCAGCAAG |
| siRNA 2042 | 2042 | UUGCUGACAAUAAAGAUAU | 4093 | AUAUCUUUAUUGUCAGCAA |
| siRNA 2043 | 2043 | UGCUGACAAUAAAGAUAUU | 4094 | AAUAUCUUUAUUGUCAGCA |
| SiRNA 2044 | 2044 | GCUGACAAUAAAGAUAUUU | 4095 | AAAUAUCUUUAUUGUCAGC |
| siRNA 2045 | 2045 | CUGACAAUAAAGAUAUUUC | 4096 | GAAAUAUCUUUAUUGUCAG |
| siRNA 2046 | 2046 | UGACAAUAAAGAUAUUUCC | 4097 | GGAAAUAUCUUUAUUGUCA |
| siRNA 2047 | 2047 | GACAAUAAAGAUAUUUCCA | 4098 | UGGAAAUAUCUUUAUUGUC |
| siRNA 2048 | 2048 | ACAAUAAAGAUAUUUCCAA | 4099 | UUGGAAAUAUCUUUAUUGU |
| SiRNA 2049 | 2049 | CAAUAAAGAUAUUUCCAAG | 4100 | CUUGGAAAUAUCUUUAUUG |
| siRNA 2050 | 2050 | AAUAAAGAUAUUUCCAAGA | 4101 | UCUUGGAAAUAUCUUUAUU |
| siRNA 2051 | 2051 | AUAAAGAUAUUUCCAAGAA | 4102 | UUCUUGGAAAUAUCUUUAU |

Further Sequences

| SEQ ID | |
|---|---|
| NO: | 5′ to 3′ Sequence |
| 4803 | GCCTCCCACTGCCCCTCAGGCCAGCTCAGGAGCCA |
| | TGGGGCGCTGGGCCTGGGTCCCCAGCCCCTGGCCC |
| | CCACCGGGGCTGGGCCCCTTCCTCCTCCTCCTCCT |
| | GCTGCTGCTGCTGCTGCCACGGGGGTTCCAGCCCC |
| | AGCCTGGCGGGAACCGTACGGAGTCCCCAGAACCT |
| | AATGCCACAGCGACCCCTGCGATCCCCACTATCCT |
| | GGTGACCTCTGTGACCTCTGAGACCCCAGCAACAA |
| | GTGCTCCAGAGGCAGAGGGACCCCAAAGTGGGGGG |
| | CTCCCGCCCCCGCCCAGGGCAGTTCCCTCGAGCAG |
| | TAGCCCCCAGGCCCAAGCACTCACCGAGGACGGGA |
| | GGCCCTGCAGGTTCCCCTTCCGCTACGGGGGCCGC |
| | ATGCTGCATGCCTGCACTTCGGAGGGCAGTGCACA |
| | CAGGAAGTGGTGTGCCACAACTCACAACTACGACC |
| | GGGACAGGGCCTGGGGCTACTGTGTGGAGGCCACC |
| | CCGCCTCCAGGGGGCCCAGCTGCCCTGGATCCCTG |
| | TGCCTCCGGCCCCTGCCTCAATGGAGGCTCCTGCT |
| | CCAATACCCAGGACCCCCAGTCCTATCACTGCAGC |
| | TGCCCCCGGGCCTTCACCGGCAAGGACTGCGGCAC |
| | AGAGAAATGCTTTGATGAGACCCGCTACGAGTACC |
| | TGGAGGGGGGCGACCGCTGGGCCCGCGTGCGCCAG |
| | GGCCACGTGGAACAGTGCGAGTGCTTCGGGGGCCG |
| | GACCTGGTGCGAAGGCACCCGACATACAGCTTGTC |
| | TGAGCAGCCCTTGCCTGAACGGGGGCACCTGCCAC |
| | CTGATCGTGGCCACCGGGACCACCGTGTGTGCCTG |
| | CCCACCAGGCTTCGCTGGACGGCTCTGCAACATCG |
| | AGCCTGATGAGCGCTGCTTCTTGGGGAACGGCACT |
| | GGGTACCGTGGCGTGGCCAGCACCTCAGCCTCGGG |
| | CCTCAGCTGCCTGGCCTGGAACTCCGATCTGCTCT |
| | ACCAGGAGCTGCACGTGGACTCCGTGGGCGCCGCG |
| | GCCCTGCTGGGCCTGGGCCCCCATGCCTACTGCCG |
| | GAATCCGGACAATGACGAGAGGCCCTGGTGCTACG |
| | TGGTGAAGGACAGCGCGCTCTCCTGGGAGTACTGC |
| | CGCCTGGAGGCCTGCGAATCCCTCACCAGAGTCCA |
| | ACTGTCACCGGATCTCCTGGCGACCCTGCCTGAGC |
| | CAGCCTCCCCGGGGCGCCAGGCCTGCGGCAGGAGG |
| | CACAAGAAGAGGACGTTCCTGCGGCCACGTATCAT |
| | CGGCGGCTCCTCCTCGCTGCCCGGCTCGCACCCCT |
| | GGCTGGCCGCCATCTACATCGGGGACAGCTTCTGC |
| | GCCGGGAGCCTGGTCCACACCTGCTGGGTGGTGTC |
| | GGCCGCCCACTGCTTCTCCCACAGCCCCCCCAGGG |
| | ACAGCGTCTCCGTGGTGCTGGGCCAGCACTTCTTC |
| | AACCGCACGACGGACGTGACGCAGACCTTCGGCAT |
| | CGAGAAGTACATCCCGTACACCCTGTACTCGGTGT |
| | TCAACCCCAGCGACCACGACCTCGTCCTGATCCGG |
| | CTGAAGAAGAAAGGGGACCGCTGTGCCACACGCTC |
| | GCAGTTCGTGCAGCCCATCTGCCTGCCCGAGCCCG |
| | GCAGCACCTTCCCCGCAGGACACAAGTGCCAGATT |
| | GCGGGCTGGGGCCACTTGGATGAGAACGTGAGCGG |
| | CTACTCCAGCTCCCTGCGGGAGGCCCTGGTCCCCC |
| | TGGTCGCCGACCACAAGTGCAGCAGCCCTGAGGTC |
| | TACGGCGCCGACATCAGCCCCAACATGCTCTGTGC |
| | CGGCTACTTCGACTGCAAGTCCGACGCCTGCCAGG |
| | GGGACTCAGGGGGGCCCCTGGCCTGCGAGAAGAAC |
| | GGCGTGGCTTACCTCTACGGCATCATCAGCTGGGG |
| | TGACGGCTGCGGGCGGCTCCACAAGCCGGGGGTCT |
| | ACACCCGCGTGGCCAACTATGTGGACTGGATCAAC |
| | GACCGGATACGGCCTCCCAGGCGGCTTGTGGCTCC |
| | CTCCTGACCCTCCAGCGGGACACCCTGGTTCCCAC |
| | CATTCCCTGCCTTGCTGACAATAAAGATATTTCCA |
| | AGAA |
| 4804 | [ETL17]scuaTmgUfGfGfAfcuggmaucaaasusu |
| 4805 | [ETL17]scuaTmgUfGfGfAfcugmgaucaaasusu |
| 4806 | [ETL17]scuauGfuGfgAfcuggaucaaasusu |
| 4807 | [ETL17]scuauGfuGfgAfcuggaucaaasusu |
| 4808 | [ETL17]scuauGfuGfgAfcuggaucaaasusu |
| 4809 | [ETL17]scuauGfuGfgAfcuggaucaaasusu |
| 4810 | [ETL17]scuauGfuGfgAfcuggaucaaasusu |
| 4811 | [ETL17]scuauGfuGfgAfcuggaucaaasusu |
| 4812 | [ETL17]scuauGfuGfgAfcuggaucaaasusu |
| 4813 | [ETL17]scuauGfuGfgAfcuggaucaaasusu |
| 4814 | usUfsugaUfcCfaGfuCfcAfcAfuAfgsusu |
| 4815 | usUfsugaUfcCfaGfuccAfcAfuAfgsusu |
| 4816 | usUfsugaUfcCfaGfuccAfcAfuagsusu |
| 4817 | usUfsugaUfCfcaGfuCfcAfcAfuAfgsusu |
| 4818 | usUfsugauCfcaGfuCfcAfcAfuAfgsusu |
| 4819 | usUfsugAfuCfcaGfuCfcAfcAfuAfgsusu |
| 4820 | usUfsugAfuCfcaGfuccAfcAfuAfgsusu |
| 4821 | usUfsugAfuCfcAfguccAfcAfuagsusu |

What is claimed is:

1. A composition comprising an oligonucleotide that targets hepatocyte growth factor activator (HGFAC) and when administered to a subject having cancer in an effective amount improves a clinical response related to the cancer.

2. The composition of claim 1, wherein the improved clinical response comprises at least a 10% increase in a clinical response measurement relative to a baseline clinical response measurement obtained from the subject prior to administration of the composition.

3. The composition of claim 1, wherein the clinical response comprises progression free survival, duration of response, disease control rate, health-related quality of life, milestone survival, clinical benefit rate, pathological complete response, complete response, objective response rate, duration of clinical benefit, time to next treatment, time to treatment failure, disease-free survival, or time to cancer progression.

4. A composition comprising an oligonucleotide that targets HGFAC and when administered to a subject in an effective amount alters an immune cell measurement in a subject.

5. The composition of claim 4, wherein the immune cell measurement is altered by about 10% or more, as compared to prior to administration.

6. The composition of claim 4, wherein the immune cell measurement comprises a myeloid derived suppressor cell or subpopulation count, CD8+ tumor infiltrating lymphocyte count, leukocyte count, T lymphocyte count, activated T lymphocyte count, B lymphocyte count, activated B lymphocyte count, monocyte count, macrophage count, activated macrophage count, dendritic cell count, neutrophil count, eosinophil count, basophil count, or mast cell count.

7. A composition comprising an oligonucleotide that targets HGFAC and when administered to a subject in an effective amount increases an antibody level in a subject.

8. The composition of claim 7, wherein the antibody level is increased by about 10% or more, as compared to prior to administration.

9. The composition of claim 7, wherein the antibody level comprises an IgA level, IgG level, or IgM level.

10. A composition comprising an oligonucleotide that targets HGFAC and when administered to a subject in an effective amount decreases a tumor marker level in a subject.

11. The composition of claim 10, wherein the tumor marker level is decreased by about 10% or more, as compared to prior to administration.

12. The composition of claim 10, wherein the tumor marker comprises CEA, PSA, CA 125, CA 15-3, CA 19-9, CA 27.29, CA 72-4, AFP, hCG, B2M, BTA, Calcitonin, CgA, CELLSEARCH, DCP, Gastrin, HE4, LDH, NSE, NMP22, or PAP.

13. The composition of any one of claims 1-12, wherein the oligonucleotide comprises a modified internucleoside linkage.

14. The composition of claim 13, wherein the modified internucleoside linkage comprises alkylphosphonate, phosphorothioate, methylphosphonate, phosphorodithioate, alkylphosphonothioate, phosphoramidate, carbamate, carbonate, phosphate triester, acetamidate, or carboxymethyl ester, or a combination thereof.

15. The composition of claim 13, wherein the modified internucleoside linkage comprises one or more phosphorothioate linkages.

16. The composition of any one of claims 1-12, wherein the oligonucleotide comprises 1, 2, 3, 4, 5, 6, 7, 8, 9, 10, 11, 12, 13, 14, 15, 16, 17, 18, 19, or 20 modified internucleoside linkages.

17. The composition of any one of claims 1-12, wherein the oligonucleotide comprises a modified nucleoside.

18. The composition of claim 17, wherein the modified nucleoside comprises a locked nucleic acid (LNA), hexitol nucleic acid (HLA), cyclohexene nucleic acid (CeNA), 2′-methoxyethyl, 2′-O-alkyl, 2′-O-allyl, 2′-O-allyl, 2′-fluoro, or 2′-deoxy, or a combination thereof.

19. The composition of claim 17, wherein the modified nucleoside comprises a LNA.

20. The composition of claim 17, wherein the modified nucleoside comprises a 2′,4′ constrained ethyl nucleic acid.

21. The composition of claim 17, wherein the modified nucleoside comprises a 2′-O-methyl nucleoside, 2′-deoxyfluoro nucleoside, 2′-O—N-methylacetamido (2′-O-NMA) nucleoside, a 2′-O-dimethylaminoethoxyethyl (2′-O-DMAEOE) nucleoside, 2′-O-aminopropyl (2′-O-AP) nucleoside, or 2′-ara-F, or a combination thereof.

22. The composition of claim 17, wherein the modified nucleoside comprises one or more 2′fluoro modified nucleosides.

23. The composition of claim 17, wherein the modified nucleoside comprises a 2′ O-alkyl modified nucleoside.

24. The composition of any one of claims 1-12, wherein the oligonucleotide comprises 1, 2, 3, 4, 5, 6, 7, 8, 9, 10, 11, 12, 13, 14, 15, 16, 17, 18, 19, 20, or 21 modified nucleosides.

25. The composition of any one of claims 1-12, wherein the oligonucleotide comprises a lipid attached at a 3′ or 5′ terminus of the oligonucleotide.

26. The composition of claim 25, wherein the lipid comprises cholesterol, myristoyl, palmitoyl, stearoyl, lithocholoyl, docosanoyl, docosahexaenoyl, myristyl, palmityl stearyl, or α-tocopherol, or a combination thereof.

27. The composition of any one of claims 1-12, wherein the oligonucleotide comprises a sugar moiety attached at a 3′ or 5′ terminus of the oligonucleotide.

28. The composition of claim 27, wherein the sugar comprises N-acetylgalactosamine (GalNAc), N-acetylglucosamine (GlcNAc), or mannose.

29. The composition of any one of claims 1-12, wherein the oligonucleotide comprises a small interfering RNA (siRNA) comprising a sense strand and an antisense strand.

30. The composition of claim 29, wherein the sense strand is 12-30 nucleosides in length.

31. The composition of claim 29, wherein the antisense strand is 12-30 nucleosides in length.

32. A composition comprising an oligonucleotide that inhibits the expression of HGFAC, wherein the oligonucleotide comprises an siRNA comprising a sense strand and an antisense strand, each strand is independently about 12-30 nucleosides in length, and at least one of the sense strand and the antisense strand comprises a nucleoside sequence comprising about 12-30 contiguous nucleosides of SEQ ID NO: 4803.

33. The composition of claim 29, wherein any one of the following is true with regard to the sense strand:
all purines comprise 2′ fluoro modified purines, and all pyrimidines comprise a mixture of 2′ fluoro and 2′-O-methyl modified pyrimidines;
all purines comprise 2′-O-methyl modified purines, and all pyrimidines comprise a mixture of 2′ fluoro and 2′-O-methyl modified pyrimidines;
all purines comprise 2′ fluoro modified purines, and all pyrimidines comprise 2′-O-methyl modified pyrimidines;
all pyrimidines comprise 2′ fluoro modified pyrimidines, and all purines comprise a mixture of 2′ fluoro and 2′-O-methyl modified purines;
all pyrimidines comprise 2′-O-methyl modified pyrimidines, and all purines comprise a mixture of 2′ fluoro and 2′-O-methyl modified purines; or
all pyrimidines comprise 2′ fluoro modified pyrimidines, and all purines comprise 2′-O-methyl modified purines.

34. The composition of claim 29, wherein any one of the following is true with regard to the antisense strand:
all purines comprise 2′ fluoro modified purines, and all pyrimidines comprise a mixture of 2′ fluoro and 2′-O-methyl modified pyrimidines;
all purines comprise 2′-O-methyl modified purines, and all pyrimidines comprise a mixture of 2′ fluoro and 2′-O-methyl modified pyrimidines;
all purines comprise 2′-O-methyl modified purines, and all pyrimidines comprise 2′ fluoro modified pyrimidines;
all pyrimidines comprise 2′ fluoro modified pyrimidines, and all purines comprise a mixture of 2′ fluoro and 2′-O-methyl modified purines;
all pyrimidines comprise 2′-O-methyl modified pyrimidines, and all purines comprise a mixture of 2′ fluoro and 2′-O-methyl modified purines; or
all pyrimidines comprise 2′-O-methyl modified pyrimidines, and all purines comprise 2′ fluoro modified purines.

35. The composition of any one of claims 1-12, wherein the oligonucleotide comprises an antisense oligonucleotide (ASO).

36. The composition of claim 35, wherein the ASO is 12-30 nucleosides in length.

37. A composition comprising an oligonucleotide that inhibits the expression of HGFAC, wherein the oligonucleotide comprises an ASO about 12-30 nucleosides in length and a nucleoside sequence complementary to about 12-30 contiguous nucleosides of SEQ ID NO: 4803.

38. The composition of any one of claims 1-12, further comprising a pharmaceutically acceptable carrier.

39. A method of treating a subject having cancer, comprising administering an effective amount of the composition of any one of claims 1-12 to the subject.

40. The method of claim 39, further comprising administering a checkpoint inhibitor to the subject.

41. The method of claim 40, wherein the checkpoint inhibitor comprises a PD1 inhibitor, a PD11inhibitor, a CTLA4 inhibitor of a combination thereof.

42. The method of claim 39, further comprising administering radiotherapy to the subject.

43. The method of claim 39, wherein the cancer comprises a malignant neoplasm, a solid tumor, or a hematological cancer.

44. The method of claim 39, wherein the cancer comprises a malignant neoplasm of a urinary tract, malignant neoplasm of an endocrine gland, malignant neoplasm of a soft tissue, malignant neoplasm of skin, malignant neoplasm of a skeletal system, malignant neoplasm of a respiratory organ, malignant neoplasm of an intrathoracic organ, malignant neoplasm of a genital organ, malignant neoplasm of a lip, malignant neoplasm of an oral cavity, malignant neoplasm of a pharynx, malignant neoplasm of an eye, malignant neoplasm of a central nervous system, malignant neoplasm of a brain, malignant neoplasm of a digestive system, malignant neoplasm of a breast, malignant neoplasm of a pancreas, or a malignant melanoma.

45. A method of treating cancer in a subject in need thereof, the method comprising administering the subject an effective amount of a composition that inhibits HGFAC.

46. The method of claim 45, wherein the composition comprises an oligonucleotide.

47. The method of claim 46, wherein the oligonucleotide comprises an siRNA.

48. A method of treating cancer in a subject in need thereof, the method comprising administering the subject an effective amount of an siRNA that targets HGFAC.

49. The method of claim 48, wherein the administration reduces a symptom or a clinical finding associated with the cancer by at least 10%.

The application's sequence listing, which the Patent Office published only in electronic form, follows.

SEQUENCE LISTING (4823 sequences)

SEQ ID NO: 1 - RNA, 19 nt, synthetic construct
  source 1..19: mol_type = other RNA
gcctcccactgcccctcag

SEQ ID NO: 2 - RNA, 19 nt, synthetic construct
  source 1..19: mol_type = other RNA
cctcccactgcccctcagg

SEQ ID NO: 3 - RNA, 19 nt, synthetic construct
  source 1..19: mol_type = other RNA
ctcccactgcccctcaggc

SEQ ID NO: 4 - RNA, 19 nt, synthetic construct
  source 1..19: mol_type = other RNA
tcccactgcccctcaggcc

SEQ ID NO: 5 - RNA, 19 nt, synthetic construct
  source 1..19: mol_type = other RNA
cccactgcccctcaggcca

SEQ ID NO: 6 - RNA, 19 nt, synthetic construct
  source 1..19: mol_type = other RNA
ccactgcccctcaggccag

SEQ ID NO: 7 - RNA, 19 nt, synthetic construct
  source 1..19: mol_type = other RNA
cactgcccctcaggccagc

SEQ ID NO: 8 - RNA, 19 nt, synthetic construct
  source 1..19: mol_type = other RNA
actgcccctcaggccagct

SEQ ID NO: 9 - RNA, 19 nt, synthetic construct
  source 1..19: mol_type = other RNA
ctgcccctcaggccagctc

SEQ ID NO: 10 - RNA, 19 nt, synthetic construct
  source 1..19: mol_type = other RNA
tgcccctcaggccagctca

SEQ ID NO: 11 - RNA, 19 nt, synthetic construct
  source 1..19: mol_type = other RNA
gcccctcaggccagctcag

SEQ ID NO: 12 - RNA, 19 nt, synthetic construct
  source 1..19: mol_type = other RNA
cccctcaggccagctcagg

SEQ ID NO: 13 - RNA, 19 nt, synthetic construct
  source 1..19: mol_type = other RNA
ccctcaggccagctcagga

SEQ ID NO: 14 - RNA, 19 nt, synthetic construct
  source 1..19: mol_type = other RNA
cctcaggccagctcaggag

SEQ ID NO: 15 - RNA, 19 nt, synthetic construct
  source 1..19: mol_type = other RNA
ctcaggccagctcaggagc

SEQ ID NO: 16 - RNA, 19 nt, synthetic construct
  source 1..19: mol_type = other RNA
tcaggccagctcaggagcc

SEQ ID NO: 17 - RNA, 19 nt, synthetic construct
  source 1..19: mol_type = other RNA
caggccagctcaggagcca

SEQ ID NO: 18 - RNA, 19 nt, synthetic construct
  source 1..19: mol_type = other RNA
aggccagctcaggagccat

SEQ ID NO: 19 - RNA, 19 nt, synthetic construct
  source 1..19: mol_type = other RNA
ggccagctcaggagccatg

SEQ ID NO: 20 - RNA, 19 nt, synthetic construct
  source 1..19: mol_type = other RNA
gccagctcaggagccatgg

SEQ ID NO: 21 - RNA, 19 nt, synthetic construct
  source 1..19: mol_type = other RNA
ccagctcaggagccatggg

SEQ ID NO: 22 - RNA, 19 nt, synthetic construct
  source 1..19: mol_type = other RNA
cagctcaggagccatgggg

SEQ ID NO: 23 - RNA, 19 nt, synthetic construct
  source 1..19: mol_type = other RNA
agctcaggagccatggggc

SEQ ID NO: 24 - RNA, 19 nt, synthetic construct
  source 1..19: mol_type = other RNA
gctcaggagccatggggcg

SEQ ID NO: 25 - RNA, 19 nt, synthetic construct
  source 1..19: mol_type = other RNA
ctcaggagccatggggcgc

SEQ ID NO: 26 - RNA, 19 nt, synthetic construct
  source 1..19: mol_type = other RNA
tcaggagccatggggcgct

SEQ ID NO: 27 - RNA, 19 nt, synthetic construct
  source 1..19: mol_type = other RNA
caggagccatggggcgctg

SEQ ID NO: 28 - RNA, 19 nt, synthetic construct
  source 1..19: mol_type = other RNA
aggagccatggggcgctgg

SEQ ID NO: 29 - RNA, 19 nt, synthetic construct
  source 1..19: mol_type = other RNA
ggagccatggggcgctggg

SEQ ID NO: 30 - RNA, 19 nt, synthetic construct
  source 1..19: mol_type = other RNA
gagccatggggcgctgggc

SEQ ID NO: 31 - RNA, 19 nt, synthetic construct
  source 1..19: mol_type = other RNA
agccatggggcgctgggcc

SEQ ID NO: 32 - RNA, 19 nt, synthetic construct
  source 1..19: mol_type = other RNA
gccatggggcgctgggcct

SEQ ID NO: 33 - RNA, 19 nt, synthetic construct
  source 1..19: mol_type = other RNA
ccatggggcgctgggcctg

SEQ ID NO: 34 - RNA, 19 nt, synthetic construct
  source 1..19: mol_type = other RNA
catggggcgctgggcctgg

SEQ ID NO: 35 - RNA, 19 nt, synthetic construct
  source 1..19: mol_type = other RNA
atggggcgctgggcctggg

SEQ ID NO: 36 - RNA, 19 nt, synthetic construct
  source 1..19: mol_type = other RNA
tggggcgctgggcctgggt

SEQ ID NO: 37 - RNA, 19 nt, synthetic construct
  source 1..19: mol_type = other RNA
ggggcgctgggcctgggtc

SEQ ID NO: 38 - RNA, 19 nt, synthetic construct
  source 1..19: mol_type = other RNA
gggcgctgggcctgggtcc

SEQ ID NO: 39 - RNA, 19 nt, synthetic construct
  source 1..19: mol_type = other RNA
ggcgctgggcctgggtccc

SEQ ID NO: 40 - RNA, 19 nt, synthetic construct
  source 1..19: mol_type = other RNA
gcgctgggcctgggtcccc

SEQ ID NO: 41 - RNA, 19 nt, synthetic construct
  source 1..19: mol_type = other RNA
cgctgggcctgggtcccca

SEQ ID NO: 42 - RNA, 19 nt, synthetic construct
  source 1..19: mol_type = other RNA
gctgggcctgggtccccag

SEQ ID NO: 43 - RNA, 19 nt, synthetic construct
  source 1..19: mol_type = other RNA
ctgggcctgggtccccagc

SEQ ID NO: 44 - RNA, 19 nt, synthetic construct
  source 1..19: mol_type = other RNA
tgggcctgggtccccagcc

SEQ ID NO: 45 - RNA, 19 nt, synthetic construct
  source 1..19: mol_type = other RNA
gggcctgggtccccagccc

SEQ ID NO: 46 - RNA, 19 nt, synthetic construct
  source 1..19: mol_type = other RNA
ggcctgggtccccagcccc

SEQ ID NO: 47 - RNA, 19 nt, synthetic construct
  source 1..19: mol_type = other RNA
gcctgggtccccagcccct

SEQ ID NO: 48 - RNA, 19 nt, synthetic construct
  source 1..19: mol_type = other RNA
cctgggtccccagcccctg

SEQ ID NO: 49 - RNA, 19 nt, synthetic construct
  source 1..19: mol_type = other RNA
ctgggtccccagcccctgg

SEQ ID NO: 50 - RNA, 19 nt, synthetic construct
  source 1..19: mol_type = other RNA
tgggtccccagcccctggc

SEQ ID NO: 51 - RNA, 19 nt, synthetic construct
  source 1..19: mol_type = other RNA
gggtccccagcccctggcc

SEQ ID NO: 52 - RNA, 19 nt, synthetic construct
  source 1..19: mol_type = other RNA
ggtccccagcccctggccc

SEQ ID NO: 53 - RNA, 19 nt, synthetic construct
  source 1..19: mol_type = other RNA
gtccccagcccctggcccc

SEQ ID NO: 54 - RNA, 19 nt, synthetic construct
  source 1..19: mol_type = other RNA
tccccagcccctggccccc

SEQ ID NO: 55 - RNA, 19 nt, synthetic construct
  source 1..19: mol_type = other RNA
ccccagcccctggccccca

SEQ ID NO: 56 - RNA, 19 nt, synthetic construct
  source 1..19: mol_type = other RNA
cccagcccctggcccccac

SEQ ID NO: 57 - RNA, 19 nt, synthetic construct
  source 1..19: mol_type = other RNA
ccagcccctggcccccacc

SEQ ID NO: 58 - RNA, 19 nt, synthetic construct
  source 1..19: mol_type = other RNA
cagcccctggcccccaccg

SEQ ID NO: 59 - RNA, 19 nt, synthetic construct
  source 1..19: mol_type = other RNA
agcccctggcccccaccgg

SEQ ID NO: 60 - RNA, 19 nt, synthetic construct
  source 1..19: mol_type = other RNA
gcccctggcccccaccggg

SEQ ID NO: 61 - RNA, 19 nt, synthetic construct
  source 1..19: mol_type = other RNA
cccctggcccccaccgggg

SEQ ID NO: 62 - RNA, 19 nt, synthetic construct
  source 1..19: mol_type = other RNA
ccctggcccccaccggggc

SEQ ID NO: 63 - RNA, 19 nt, synthetic construct
  source 1..19: mol_type = other RNA
cctggcccccaccggggct

SEQ ID NO: 64 - RNA, 19 nt, synthetic construct
  source 1..19: mol_type = other RNA
ctggcccccaccggggctg

SEQ ID NO: 65 - RNA, 19 nt, synthetic construct
  source 1..19: mol_type = other RNA
tggcccccaccggggctgg

SEQ ID NO: 66 - RNA, 19 nt, synthetic construct
  source 1..19: mol_type = other RNA
ggcccccaccggggctggg

SEQ ID NO: 67 - RNA, 19 nt, synthetic construct
  source 1..19: mol_type = other RNA
gcccccaccggggctgggc

SEQ ID NO: 68 - RNA, 19 nt, synthetic construct
  source 1..19: mol_type = other RNA
cccccaccggggctgggcc

SEQ ID NO: 69 - RNA, 19 nt, synthetic construct
  source 1..19: mol_type = other RNA
ccccaccggggctgggccc

SEQ ID NO: 70 - RNA, 19 nt, synthetic construct
  source 1..19: mol_type = other RNA
cccaccggggctgggcccc

SEQ ID NO: 71 - RNA, 19 nt, synthetic construct
  source 1..19: mol_type = other RNA
ccaccggggctgggcccct

SEQ ID NO: 72 - RNA, 19 nt, synthetic construct
  source 1..19: mol_type = other RNA
caccggggctgggcccctt

SEQ ID NO: 73 - RNA, 19 nt, synthetic construct
  source 1..19: mol_type = other RNA
accggggctgggccccttc

SEQ ID NO: 74 - RNA, 19 nt, synthetic construct
  source 1..19: mol_type = other RNA
ccggggctgggccccttcc

SEQ ID NO: 75 - RNA, 19 nt, synthetic construct
  source 1..19: mol_type = other RNA
cggggctgggccccttcct

SEQ ID NO: 76 - RNA, 19 nt, synthetic construct
  source 1..19: mol_type = other RNA
ggggctgggccccttcctc

SEQ ID NO: 77 - RNA, 19 nt, synthetic construct
  source 1..19: mol_type = other RNA
gggctgggccccttcctcc

SEQ ID NO: 78 - RNA, 19 nt, synthetic construct
  source 1..19: mol_type = other RNA
ggctgggccccttcctcct

SEQ ID NO: 79 - RNA, 19 nt, synthetic construct
  source 1..19: mol_type = other RNA
gctgggccccttcctcctc

SEQ ID NO: 80 - RNA, 19 nt, synthetic construct
  source 1..19: mol_type = other RNA
ctgggccccttcctcctcc

SEQ ID NO: 81 - RNA, 19 nt, synthetic construct
  source 1..19: mol_type = other RNA
tgggccccttcctcctcct

SEQ ID NO: 82 - RNA, 19 nt, synthetic construct
  source 1..19: mol_type = other RNA
gggccccttcctcctcctc

SEQ ID NO: 83 - RNA, 19 nt, synthetic construct
  source 1..19: mol_type = other RNA
ggccccttcctcctcctcc

SEQ ID NO: 84 - RNA, 19 nt, synthetic construct
  source 1..19: mol_type = other RNA
gccccttcctcctcctcct

SEQ ID NO: 85 - RNA, 19 nt, synthetic construct
  source 1..19: mol_type = other RNA
ccccttcctcctcctcctc

SEQ ID NO: 86 - RNA, 19 nt, synthetic construct
  source 1..19: mol_type = other RNA
cccttcctcctcctcctcc

SEQ ID NO: 87 - RNA, 19 nt, synthetic construct
  source 1..19: mol_type = other RNA
ccttcctcctcctcctcct

SEQ ID NO: 88 - RNA, 19 nt, synthetic construct
  source 1..19: mol_type = other RNA
cttcctcctcctcctcctg

SEQ ID NO: 89 - RNA, 19 nt, synthetic construct
  source 1..19: mol_type = other RNA
ttcctcctcctcctcctgc

SEQ ID NO: 90 - RNA, 19 nt, synthetic construct
  source 1..19: mol_type = other RNA
tcctcctcctcctcctgct

SEQ ID NO: 91 - RNA, 19 nt, synthetic construct
  source 1..19: mol_type = other RNA
cctcctcctcctcctgctg

SEQ ID NO: 92 - RNA, 19 nt, synthetic construct
  source 1..19: mol_type = other RNA
ctcctcctcctcctgctgc

SEQ ID NO: 93 - RNA, 19 nt, synthetic construct
  source 1..19: mol_type = other RNA
tcctcctcctcctgctgct

SEQ ID NO: 94 - RNA, 19 nt, synthetic construct
  source 1..19: mol_type = other RNA
cctcctcctcctgctgctg

SEQ ID NO: 95 - RNA, 19 nt, synthetic construct
  source 1..19: mol_type = other RNA
ctcctcctcctgctgctgc

SEQ ID NO: 96 - RNA, 19 nt, synthetic construct
  source 1..19: mol_type = other RNA
tcctcctcctgctgctgct

SEQ ID NO: 97 - RNA, 19 nt, synthetic construct
  source 1..19: mol_type = other RNA
cctcctcctgctgctgctg

SEQ ID NO: 98 - RNA, 19 nt, synthetic construct
  source 1..19: mol_type = other RNA
ctcctcctgctgctgctgc

SEQ ID NO: 99 - RNA, 19 nt, synthetic construct
  source 1..19: mol_type = other RNA
tcctcctgctgctgctgct

SEQ ID NO: 100 - RNA, 19 nt, synthetic construct
  source 1..19: mol_type = other RNA
cctcctgctgctgctgctg

SEQ ID NO: 101 - RNA, 19 nt, synthetic construct
  source 1..19: mol_type = other RNA
ctcctgctgctgctgctgc

SEQ ID NO: 102 - RNA, 19 nt, synthetic construct
  source 1..19: mol_type = other RNA
tcctgctgctgctgctgct

SEQ ID NO: 103 - RNA, 19 nt, synthetic construct
  source 1..19: mol_type = other RNA
cctgctgctgctgctgctg

SEQ ID NO: 104 - RNA, 19 nt, synthetic construct
  source 1..19: mol_type = other RNA
ctgctgctgctgctgctgc

SEQ ID NO: 105 - RNA, 19 nt, synthetic construct
  source 1..19: mol_type = other RNA
tgctgctgctgctgctgcc

SEQ ID NO: 106 - RNA, 19 nt, synthetic construct
  source 1..19: mol_type = other RNA
gctgctgctgctgctgcca

SEQ ID NO: 107 - RNA, 19 nt, synthetic construct
  source 1..19: mol_type = other RNA
ctgctgctgctgctgccac

SEQ ID NO: 108 - RNA, 19 nt, synthetic construct
  source 1..19: mol_type = other RNA
tgctgctgctgctgccacg

SEQ ID NO: 109 - RNA, 19 nt, synthetic construct
  source 1..19: mol_type = other RNA
gctgctgctgctgccacgg

SEQ ID NO: 110 - RNA, 19 nt, synthetic construct
  source 1..19: mol_type = other RNA
ctgctgctgctgccacggg

SEQ ID NO: 111 - RNA, 19 nt, synthetic construct
  source 1..19: mol_type = other RNA
tgctgctgctgccacgggg

SEQ ID NO: 112 - RNA, 19 nt, synthetic construct
  source 1..19: mol_type = other RNA
gctgctgctgccacggggg

SEQ ID NO: 113 - RNA, 19 nt, synthetic construct
  source 1..19: mol_type = other RNA
ctgctgctgccacgggggt

SEQ ID NO: 114 - RNA, 19 nt, synthetic construct
  source 1..19: mol_type = other RNA
tgctgctgccacgggggtt

SEQ ID NO: 115 - RNA, 19 nt, synthetic construct
  source 1..19: mol_type = other RNA
gctgctgccacgggggttc

SEQ ID NO: 116 - RNA, 19 nt, synthetic construct
  source 1..19: mol_type = other RNA
ctgctgccacgggggttcc

SEQ ID NO: 117 - RNA, 19 nt, synthetic construct
  source 1..19: mol_type = other RNA
tgctgccacgggggttcca

SEQ ID NO: 118 - RNA, 19 nt, synthetic construct
  source 1..19: mol_type = other RNA
gctgccacgggggttccag

SEQ ID NO: 119 - RNA, 19 nt, synthetic construct
  source 1..19: mol_type = other RNA
ctgccacgggggttccagc

SEQ ID NO: 120 - RNA, 19 nt, synthetic construct
  source 1..19: mol_type = other RNA
tgccacgggggttccagcc

SEQ ID NO: 121 - RNA, 19 nt, synthetic construct
  source 1..19: mol_type = other RNA
gccacgggggttccagccc

SEQ ID NO: 122 - RNA, 19 nt, synthetic construct
  source 1..19: mol_type = other RNA
ccacgggggttccagcccc

SEQ ID NO: 123 - RNA, 19 nt, synthetic construct
  source 1..19: mol_type = other RNA
cacgggggttccagcccca

SEQ ID NO: 124 - RNA, 19 nt, synthetic construct
  source 1..19: mol_type = other RNA
acgggggttccagccccag

SEQ ID NO: 125 - RNA, 19 nt, synthetic construct
  source 1..19: mol_type = other RNA
cgggggttccagccccagc

SEQ ID NO: 126 - RNA, 19 nt, synthetic construct
  source 1..19: mol_type = other RNA
gggggttccagccccagcc

SEQ ID NO: 127 - RNA, 19 nt, synthetic construct
  source 1..19: mol_type = other RNA
ggggttccagccccagcct

SEQ ID NO: 128 - RNA, 19 nt, synthetic construct
  source 1..19: mol_type = other RNA
gggttccagccccagcctg

SEQ ID NO: 129 - RNA, 19 nt, synthetic construct
  source 1..19: mol_type = other RNA
ggttccagccccagcctgg

SEQ ID NO: 130 - RNA, 19 nt, synthetic construct
  source 1..19: mol_type = other RNA
gttccagccccagcctggc

SEQ ID NO: 131 - RNA, 19 nt, synthetic construct
  source 1..19: mol_type = other RNA
ttccagccccagcctggcg

SEQ ID NO: 132 - RNA, 19 nt, synthetic construct
  source 1..19: mol_type = other RNA
tccagccccagcctggcgg

SEQ ID NO: 133 - RNA, 19 nt, synthetic construct
  source 1..19: mol_type = other RNA
ccagccccagcctggcggg

SEQ ID NO: 134 - RNA, 19 nt, synthetic construct
  source 1..19: mol_type = other RNA
cagccccagcctggcggga

SEQ ID NO: 135 - RNA, 19 nt, synthetic construct
  source 1..19: mol_type = other RNA
agccccagcctggcgggaa

SEQ ID NO: 136 - RNA, 19 nt, synthetic construct
  source 1..19: mol_type = other RNA
gccccagcctggcgggaac

SEQ ID NO: 137 - RNA, 19 nt, synthetic construct
  source 1..19: mol_type = other RNA
ccccagcctggcgggaacc

SEQ ID NO: 138 - RNA, 19 nt, synthetic construct
  source 1..19: mol_type = other RNA
cccagcctggcgggaaccg

SEQ ID NO: 139 - RNA, 19 nt, synthetic construct
  source 1..19: mol_type = other RNA
ccagcctggcgggaaccgt

SEQ ID NO: 140 - RNA, 19 nt, synthetic construct
  source 1..19: mol_type = other RNA
cagcctggcgggaaccgta

SEQ ID NO: 141 - RNA, 19 nt, synthetic construct
  source 1..19: mol_type = other RNA
agcctggcgggaaccgtac

SEQ ID NO: 142 - RNA, 19 nt, synthetic construct
  source 1..19: mol_type = other RNA
gcctggcgggaaccgtacg

SEQ ID NO: 143 - RNA, 19 nt, synthetic construct
  source 1..19: mol_type = other RNA
cctggcgggaaccgtacgg

SEQ ID NO: 144 - RNA, 19 nt, synthetic construct
  source 1..19: mol_type = other RNA
ctggcgggaaccgtacgga

SEQ ID NO: 145 - RNA, 19 nt, synthetic construct
  source 1..19: mol_type = other RNA
tggcgggaaccgtacggag

SEQ ID NO: 146 - RNA, 19 nt, synthetic construct
  source 1..19: mol_type = other RNA
ggcgggaaccgtacggagt

SEQ ID NO: 147 - RNA, 19 nt, synthetic construct
  source 1..19: mol_type = other RNA
gcgggaaccgtacggagtc

SEQ ID NO: 148 - RNA, 19 nt, synthetic construct
  source 1..19: mol_type = other RNA
cgggaaccgtacggagtcc

SEQ ID NO: 149 - RNA, 19 nt, synthetic construct
  source 1..19: mol_type = other RNA
gggaaccgtacggagtccc

SEQ ID NO: 150 - RNA, 19 nt, synthetic construct
  source 1..19: mol_type = other RNA
ggaaccgtacggagtcccc

SEQ ID NO: 151 - RNA, 19 nt, synthetic construct
  source 1..19: mol_type = other RNA
gaaccgtacggagtcccca

SEQ ID NO: 152 - RNA, 19 nt, synthetic construct
  source 1..19: mol_type = other RNA
aaccgtacggagtccccag

SEQ ID NO: 153 - RNA, 19 nt, synthetic construct
  source 1..19: mol_type = other RNA
accgtacggagtccccaga

SEQ ID NO: 154 - RNA, 19 nt, synthetic construct
  source 1..19: mol_type = other RNA
ccgtacggagtccccagaa

SEQ ID NO: 155 - RNA, 19 nt, synthetic construct
  source 1..19: mol_type = other RNA
cgtacggagtccccagaac

SEQ ID NO: 156 - RNA, 19 nt, synthetic construct
  source 1..19: mol_type = other RNA
gtacggagtccccagaacc

SEQ ID NO: 157 - RNA, 19 nt, synthetic construct
  source 1..19: mol_type = other RNA
tacggagtccccagaacct

SEQ ID NO: 158 - RNA, 19 nt, synthetic construct
  source 1..19: mol_type = other RNA
acggagtccccagaaccta

SEQ ID NO: 159 - RNA, 19 nt, synthetic construct
  source 1..19: mol_type = other RNA
cggagtccccagaacctaa

SEQ ID NO: 160 - RNA, 19 nt, synthetic construct
  source 1..19: mol_type = other RNA
ggagtccccagaacctaat

SEQ ID NO: 161 - RNA, 19 nt, synthetic construct
  source 1..19: mol_type = other RNA
gagtccccagaacctaatg

SEQ ID NO: 162 - RNA, 19 nt, synthetic construct
  source 1..19: mol_type = other RNA
agtccccagaacctaatgc

SEQ ID NO: 163 - RNA, 19 nt, synthetic construct
  source 1..19: mol_type = other RNA
gtccccagaacctaatgcc

SEQ ID NO: 164 - RNA, 19 nt, synthetic construct
  source 1..19: mol_type = other RNA
tccccagaacctaatgcca

SEQ ID NO: 165 - RNA, 19 nt, synthetic construct
  source 1..19: mol_type = other RNA
ccccagaacctaatgccac

SEQ ID NO: 166 - RNA, 19 nt, synthetic construct
  source 1..19: mol_type = other RNA
cccagaacctaatgccaca

SEQ ID NO: 167 - RNA, 19 nt, synthetic construct
  source 1..19: mol_type = other RNA
ccagaacctaatgccacag

SEQ ID NO: 168 - RNA, 19 nt, synthetic construct
  source 1..19: mol_type = other RNA
cagaacctaatgccacagc

SEQ ID NO: 169 - RNA, 19 nt, synthetic construct
  source 1..19: mol_type = other RNA
agaacctaatgccacagcg

SEQ ID NO: 170 - RNA, 19 nt, synthetic construct
  source 1..19: mol_type = other RNA
gaacctaatgccacagcga

SEQ ID NO: 171 - RNA, 19 nt, synthetic construct
  source 1..19: mol_type = other RNA
aacctaatgccacagcgac

SEQ ID NO: 172 - RNA, 19 nt, synthetic construct
  source 1..19: mol_type = other RNA
acctaatgccacagcgacc

SEQ ID NO: 173 - RNA, 19 nt, synthetic construct
  source 1..19: mol_type = other RNA
cctaatgccacagcgaccc

SEQ ID NO: 174 - RNA, 19 nt, synthetic construct
  source 1..19: mol_type = other RNA
ctaatgccacagcgacccc

SEQ ID NO: 175 - RNA, 19 nt, synthetic construct
  source 1..19: mol_type = other RNA
taatgccacagcgacccct

SEQ ID NO: 176 - RNA, 19 nt, synthetic construct
  source 1..19: mol_type = other RNA
aatgccacagcgacccctg

SEQ ID NO: 177 - RNA, 19 nt, synthetic construct
  source 1..19: mol_type = other RNA
atgccacagcgacccctgc

SEQ ID NO: 178 - RNA, 19 nt, synthetic construct
  source 1..19: mol_type = other RNA
tgccacagcgacccctgcg

SEQ ID NO: 179 - RNA, 19 nt, synthetic construct
  source 1..19: mol_type = other RNA
gccacagcgacccctgcga

SEQ ID NO: 180 - RNA, 19 nt, synthetic construct
  source 1..19: mol_type = other RNA
ccacagcgacccctgcgat

SEQ ID NO: 181 - RNA, 19 nt, synthetic construct
  source 1..19: mol_type = other RNA
cacagcgacccctgcgatc

SEQ ID NO: 182 - RNA, 19 nt, synthetic construct
  source 1..19: mol_type = other RNA
acagcgacccctgcgatcc

SEQ ID NO: 183 - RNA, 19 nt, synthetic construct
  source 1..19: mol_type = other RNA
cagcgacccctgcgatccc

SEQ ID NO: 184 - RNA, 19 nt, synthetic construct
  source 1..19: mol_type = other RNA
agcgacccctgcgatcccc

SEQ ID NO: 185 - RNA, 19 nt, synthetic construct
  source 1..19: mol_type = other RNA
gcgacccctgcgatcccca

SEQ ID NO: 186 - RNA, 19 nt, synthetic construct
  source 1..19: mol_type = other RNA
cgacccctgcgatccccac

SEQ ID NO: 187 - RNA, 19 nt, synthetic construct
  source 1..19: mol_type = other RNA
gacccctgcgatccccact

SEQ ID NO: 188 - RNA, 19 nt, synthetic construct
  source 1..19: mol_type = other RNA
acccctgcgatccccacta

SEQ ID NO: 189 - RNA, 19 nt, synthetic construct
  source 1..19: mol_type = other RNA
cccctgcgatccccactat

SEQ ID NO: 190 - RNA, 19 nt, synthetic construct
  source 1..19: mol_type = other RNA
ccctgcgatccccactatc

SEQ ID NO: 191 - RNA, 19 nt, synthetic construct
  source 1..19: mol_type = other RNA
cctgcgatccccactatcc

SEQ ID NO: 192 - RNA, 19 nt, synthetic construct
  source 1..19: mol_type = other RNA
ctgcgatccccactatcct

SEQ ID NO: 193 - RNA, 19 nt, synthetic construct
  source 1..19: mol_type = other RNA
tgcgatccccactatcctg

SEQ ID NO: 194 - RNA, 19 nt, synthetic construct
  source 1..19: mol_type = other RNA
gcgatccccactatcctgg

SEQ ID NO: 195 - RNA, 19 nt, synthetic construct
  source 1..19: mol_type = other RNA
cgatccccactatcctggt

SEQ ID NO: 196 - RNA, 19 nt, synthetic construct
  source 1..19: mol_type = other RNA
gatccccactatcctggtg

SEQ ID NO: 197 - RNA, 19 nt, synthetic construct
  source 1..19: mol_type = other RNA
atccccactatcctggtga

SEQ ID NO: 198 - RNA, 19 nt, synthetic construct
  source 1..19: mol_type = other RNA
tccccactatcctggtgac

SEQ ID NO: 199 - RNA, 19 nt, synthetic construct
  source 1..19: mol_type = other RNA
ccccactatcctggtgacc

SEQ ID NO: 200 - RNA, 19 nt, synthetic construct
  source 1..19: mol_type = other RNA
cccactatcctggtgacct

SEQ ID NO: 201 - RNA, 19 nt, synthetic construct
  source 1..19: mol_type = other RNA
ccactatcctggtgacctc

SEQ ID NO: 202 - RNA, 19 nt, synthetic construct
  source 1..19: mol_type = other RNA
cactatcctggtgacctct

SEQ ID NO: 203 - RNA, 19 nt, synthetic construct
  source 1..19: mol_type = other RNA
actatcctggtgacctctg

SEQ ID NO: 204 - RNA, 19 nt, synthetic construct
  source 1..19: mol_type = other RNA
ctatcctggtgacctctgt

SEQ ID NO: 205 - RNA, 19 nt, synthetic construct
  source 1..19: mol_type = other RNA
tatcctggtgacctctgtg

SEQ ID NO: 206 - RNA, 19 nt, synthetic construct
  source 1..19: mol_type = other RNA
atcctggtgacctctgtga

SEQ ID NO: 207 - RNA, 19 nt, synthetic construct
  source 1..19: mol_type = other RNA
tcctggtgacctctgtgac

SEQ ID NO: 208 - RNA, 19 nt, synthetic construct
  source 1..19: mol_type = other RNA
cctggtgacctctgtgacc

SEQ ID NO: 209 - RNA, 19 nt, synthetic construct
  source 1..19: mol_type = other RNA
ctggtgacctctgtgacct

SEQ ID NO: 210 - RNA, 19 nt, synthetic construct
  source 1..19: mol_type = other RNA
tggtgacctctgtgacctc

SEQ ID NO: 211 - RNA, 19 nt, synthetic construct
  source 1..19: mol_type = other RNA
ggtgacctctgtgacctct

SEQ ID NO: 212 - RNA, 19 nt, synthetic construct
  source 1..19: mol_type = other RNA
gtgacctctgtgacctctg

SEQ ID NO: 213 - RNA, 19 nt, synthetic construct
  source 1..19: mol_type = other RNA
tgacctctgtgacctctga

SEQ ID NO: 214 - RNA, 19 nt, synthetic construct
  source 1..19: mol_type = other RNA
gacctctgtgacctctgag

SEQ ID NO: 215 - RNA, 19 nt, synthetic construct
  source 1..19: mol_type = other RNA
acctctgtgacctctgaga

SEQ ID NO: 216 - RNA, 19 nt, synthetic construct
  source 1..19: mol_type = other RNA
cctctgtgacctctgagac

SEQ ID NO: 217 - RNA, 19 nt, synthetic construct
  source 1..19: mol_type = other RNA
ctctgtgacctctgagacc

SEQ ID NO: 218 - RNA, 19 nt, synthetic construct
  source 1..19: mol_type = other RNA
tctgtgacctctgagaccc

SEQ ID NO: 219 - RNA, 19 nt, synthetic construct
  source 1..19: mol_type = other RNA
ctgtgacctctgagacccc

SEQ ID NO: 220 - RNA, 19 nt, synthetic construct
  source 1..19: mol_type = other RNA
tgtgacctctgagacccca

SEQ ID NO: 221 - RNA, 19 nt, synthetic construct
  source 1..19: mol_type = other RNA
gtgacctctgagaccccag

SEQ ID NO: 222 - RNA, 19 nt, synthetic construct
  source 1..19: mol_type = other RNA
tgacctctgagaccccagc

SEQ ID NO: 223 - RNA, 19 nt, synthetic construct
  source 1..19: mol_type = other RNA
gacctctgagaccccagca

SEQ ID NO: 224 - RNA, 19 nt, synthetic construct
  source 1..19: mol_type = other RNA
acctctgagaccccagcaa

SEQ ID NO: 225 - RNA, 19 nt, synthetic construct
  source 1..19: mol_type = other RNA
cctctgagaccccagcaac

SEQ ID NO: 226 - RNA, 19 nt, synthetic construct
  source 1..19: mol_type = other RNA
ctctgagaccccagcaaca

SEQ ID NO: 227 - RNA, 19 nt, synthetic construct
  source 1..19: mol_type = other RNA
tctgagaccccagcaacaa

SEQ ID NO: 228 - RNA, 19 nt, synthetic construct
  source 1..19: mol_type = other RNA
ctgagaccccagcaacaag

SEQ ID NO: 229 - RNA, 19 nt, synthetic construct
  source 1..19: mol_type = other RNA
tgagaccccagcaacaagt

SEQ ID NO: 230 - RNA, 19 nt, synthetic construct
  source 1..19: mol_type = other RNA
gagaccccagcaacaagtg

SEQ ID NO: 231 - RNA, 19 nt, synthetic construct
  source 1..19: mol_type = other RNA
agaccccagcaacaagtgc

SEQ ID NO: 232 - RNA, 19 nt, synthetic construct
  source 1..19: mol_type = other RNA
gaccccagcaacaagtgct

SEQ ID NO: 233 - RNA, 19 nt, synthetic construct
  source 1..19: mol_type = other RNA
accccagcaacaagtgctc

SEQ ID NO: 234 - RNA, 19 nt, synthetic construct
  source 1..19: mol_type = other RNA
ccccagcaacaagtgctcc

SEQ ID NO: 235 - RNA, 19 nt, synthetic construct
  source 1..19: mol_type = other RNA
cccagcaacaagtgctcca

SEQ ID NO: 236 - RNA, 19 nt, synthetic construct
  source 1..19: mol_type = other RNA
ccagcaacaagtgctccag

SEQ ID NO: 237 - RNA, 19 nt, synthetic construct
  source 1..19: mol_type = other RNA
cagcaacaagtgctccaga

SEQ ID NO: 238 - RNA, 19 nt, synthetic construct
  source 1..19: mol_type = other RNA
agcaacaagtgctccagag

SEQ ID NO: 239 - RNA, 19 nt, synthetic construct
  source 1..19: mol_type = other RNA
gcaacaagtgctccagagg

SEQ ID NO: 240 - RNA, 19 nt, synthetic construct
  source 1..19: mol_type = other RNA
caacaagtgctccagaggc

SEQ ID NO: 241 - RNA, 19 nt, synthetic construct
  source 1..19: mol_type = other RNA
aacaagtgctccagaggca

SEQ ID NO: 242 - RNA, 19 nt, synthetic construct
  source 1..19: mol_type = other RNA
acaagtgctccagaggcag

SEQ ID NO: 243 - RNA, 19 nt, synthetic construct
  source 1..19: mol_type = other RNA
caagtgctccagaggcaga

SEQ ID NO: 244 - RNA, 19 nt, synthetic construct
  source 1..19: mol_type = other RNA
aagtgctccagaggcagag

SEQ ID NO: 245 - RNA, 19 nt, synthetic construct
  source 1..19: mol_type = other RNA
agtgctccagaggcagagg

SEQ ID NO: 246 - RNA, 19 nt, synthetic construct
  source 1..19: mol_type = other RNA
gtgctccagaggcagaggg

SEQ ID NO: 247 - RNA, 19 nt, synthetic construct
  source 1..19: mol_type = other RNA
tgctccagaggcagaggga

SEQ ID NO: 248 - RNA, 19 nt, synthetic construct
  source 1..19: mol_type = other RNA
gctccagaggcagagggac

SEQ ID NO: 249 - RNA, 19 nt, synthetic construct
  source 1..19: mol_type = other RNA
ctccagaggcagagggacc

SEQ ID NO: 250 - RNA, 19 nt, synthetic construct
  source 1..19: mol_type = other RNA
tccagaggcagagggaccc

SEQ ID NO: 251 - RNA, 19 nt, synthetic construct
  source 1..19: mol_type = other RNA
ccagaggcagagggacccc

SEQ ID NO: 252 - RNA, 19 nt, synthetic construct
  source 1..19: mol_type = other RNA
cagaggcagagggacccca

SEQ ID NO: 253 - RNA, 19 nt, synthetic construct
  source 1..19: mol_type = other RNA
agaggcagagggaccccaa

SEQ ID NO: 254 - RNA, 19 nt, synthetic construct
  source 1..19: mol_type = other RNA
gaggcagagggaccccaaa

SEQ ID NO: 255 - RNA, 19 nt, synthetic construct
  source 1..19: mol_type = other RNA
aggcagagggaccccaaag

SEQ ID NO: 256 - RNA, 19 nt, synthetic construct
  source 1..19: mol_type = other RNA
ggcagagggaccccaaagt

SEQ ID NO: 257 - RNA, 19 nt, synthetic construct
  source 1..19: mol_type = other RNA
gcagagggaccccaaagtg

SEQ ID NO: 258 - RNA, 19 nt, synthetic construct
  source 1..19: mol_type = other RNA
cagagggaccccaaagtgg

SEQ ID NO: 259 - RNA, 19 nt, synthetic construct
  source 1..19: mol_type = other RNA
agagggaccccaaagtggg

SEQ ID NO: 260 - RNA, 19 nt, synthetic construct
  source 1..19: mol_type = other RNA
gagggaccccaaagtgggg

SEQ ID NO: 261 - RNA, 19 nt, synthetic construct
  source 1..19: mol_type = other RNA
agggaccccaaagtggggg

SEQ ID NO: 262 - RNA, 19 nt, synthetic construct
  source 1..19: mol_type = other RNA
gggaccccaaagtgggggg

SEQ ID NO: 263 - RNA, 19 nt, synthetic construct
  source 1..19: mol_type = other RNA
ggaccccaaagtggggggc

SEQ ID NO: 264 - RNA, 19 nt, synthetic construct
  source 1..19: mol_type = other RNA
gaccccaaagtggggggct

SEQ ID NO: 265 - RNA, 19 nt, synthetic construct
  source 1..19: mol_type = other RNA
accccaaagtggggggctc

SEQ ID NO: 266 - RNA, 19 nt, synthetic construct
  source 1..19: mol_type = other RNA
ccccaaagtggggggctcc

SEQ ID NO: 267 - RNA, 19 nt, synthetic construct
  source 1..19: mol_type = other RNA
cccaaagtggggggctccc

SEQ ID NO: 268 - RNA, 19 nt, synthetic construct
  source 1..19: mol_type = other RNA
ccaaagtggggggctcccg

SEQ ID NO: 269 - RNA, 19 nt, synthetic construct
  source 1..19: mol_type = other RNA
caaagtggggggctcccgc

SEQ ID NO: 270 - RNA, 19 nt, synthetic construct
  source 1..19: mol_type = other RNA
aaagtggggggctcccgcc

SEQ ID NO: 271 - RNA, 19 nt, synthetic construct
  source 1..19: mol_type = other RNA
aagtggggggctcccgccc

SEQ ID NO: 272 - RNA, 19 nt, synthetic construct
  source 1..19: mol_type = other RNA
agtggggggctcccgcccc

SEQ ID NO: 273 - RNA, 19 nt, synthetic construct
  source 1..19: mol_type = other RNA
gtggggggctcccgccccc

SEQ ID NO: 274 - RNA, 19 nt, synthetic construct
  source 1..19: mol_type = other RNA
tggggggctcccgcccccg

SEQ ID NO: 275 - RNA, 19 nt, synthetic construct
  source 1..19: mol_type = other RNA
ggggggctcccgcccccgc

SEQ ID NO: 276 - RNA, 19 nt, synthetic construct
  source 1..19: mol_type = other RNA
gggggctcccgcccccgcc

SEQ ID NO: 277 - RNA, 19 nt, synthetic construct
  source 1..19: mol_type = other RNA
ggggctcccgcccccgccc

SEQ ID NO: 278 - RNA, 19 nt, synthetic construct
  source 1..19: mol_type = other RNA
gggctcccgcccccgccca

SEQ ID NO: 279 - RNA, 19 nt, synthetic construct
  source 1..19: mol_type = other RNA
ggctcccgcccccgcccag

SEQ ID NO: 280 - RNA, 19 nt, synthetic construct
  source 1..19: mol_type = other RNA
gctcccgcccccgcccagg

SEQ ID NO: 281 - RNA, 19 nt, synthetic construct
  source 1..19: mol_type = other RNA
ctcccgcccccgcccaggg

SEQ ID NO: 282 - RNA, 19 nt, synthetic construct
  source 1..19: mol_type = other RNA
tcccgcccccgcccagggc

SEQ ID NO: 283 - RNA, 19 nt, synthetic construct
  source 1..19: mol_type = other RNA
cccgcccccgcccagggca

SEQ ID NO: 284 - RNA, 19 nt, synthetic construct
  source 1..19: mol_type = other RNA
ccgcccccgcccagggcag

SEQ ID NO: 285 - RNA, 19 nt, synthetic construct
  source 1..19: mol_type = other RNA
cgcccccgcccagggcagt

SEQ ID NO: 286 - RNA, 19 nt, synthetic construct
  source 1..19: mol_type = other RNA
gcccccgcccagggcagtt

SEQ ID NO: 287 - RNA, 19 nt, synthetic construct
  source 1..19: mol_type = other RNA
cccccgcccagggcagttc

SEQ ID NO: 288 - RNA, 19 nt, synthetic construct
  source 1..19: mol_type = other RNA
ccccgcccagggcagttcc

SEQ ID NO: 289 - RNA, 19 nt, synthetic construct
  source 1..19: mol_type = other RNA
cccgcccagggcagttccc

SEQ ID NO: 290 - RNA, 19 nt, synthetic construct
  source 1..19: mol_type = other RNA
ccgcccagggcagttccct

SEQ ID NO: 291 - RNA, 19 nt, synthetic construct
  source 1..19: mol_type = other RNA
cgcccagggcagttccctc

SEQ ID NO: 292 - RNA, 19 nt, synthetic construct
  source 1..19: mol_type = other RNA
gcccagggcagttccctcg

SEQ ID NO: 293 - RNA, 19 nt, synthetic construct
  source 1..19: mol_type = other RNA
cccagggcagttccctcga

SEQ ID NO: 294 - RNA, 19 nt, synthetic construct
  source 1..19: mol_type = other RNA
ccagggcagttccctcgag

SEQ ID NO: 295 - RNA, 19 nt, synthetic construct
  source 1..19: mol_type = other RNA
cagggcagttccctcgagc

SEQ ID NO: 296 - RNA, 19 nt, synthetic construct
  source 1..19: mol_type = other RNA
agggcagttccctcgagca

SEQ ID NO: 297 - RNA, 19 nt, synthetic construct
  source 1..19: mol_type = other RNA
gggcagttccctcgagcag

SEQ ID NO: 298 - RNA, 19 nt, synthetic construct
  source 1..19: mol_type = other RNA
ggcagttccctcgagcagt

SEQ ID NO: 299 - RNA, 19 nt, synthetic construct
  source 1..19: mol_type = other RNA
gcagttccctcgagcagta

SEQ ID NO: 300 - RNA, 19 nt, synthetic construct
  source 1..19: mol_type = other RNA
cagttccctcgagcagtag

SEQ ID NO: 301 - RNA, 19 nt, synthetic construct
  source 1..19: mol_type = other RNA
agttccctcgagcagtagc

SEQ ID NO: 302 - RNA, 19 nt, synthetic construct
  source 1..19: mol_type = other RNA
gttccctcgagcagtagcc

SEQ ID NO: 303 - RNA, 19 nt, synthetic construct
  source 1..19: mol_type = other RNA
ttccctcgagcagtagccc

SEQ ID NO: 304 - RNA, 19 nt, synthetic construct
  source 1..19: mol_type = other RNA
tccctcgagcagtagcccc

SEQ ID NO: 305 - RNA, 19 nt, synthetic construct
  source 1..19: mol_type = other RNA
ccctcgagcagtagccccc

SEQ ID NO: 306 - RNA, 19 nt, synthetic construct
  source 1..19: mol_type = other RNA
cctcgagcagtagccccca

SEQ ID NO: 307 - RNA, 19 nt, synthetic construct
  source 1..19: mol_type = other RNA
ctcgagcagtagcccccag

SEQ ID NO: 308 - RNA, 19 nt, synthetic construct
  source 1..19: mol_type = other RNA
tcgagcagtagcccccagg

SEQ ID NO: 309 - RNA, 19 nt, synthetic construct
  source 1..19: mol_type = other RNA
cgagcagtagcccccaggc

SEQ ID NO: 310 - RNA, 19 nt, synthetic construct
  source 1..19: mol_type = other RNA
gagcagtagcccccaggcc

SEQ ID NO: 311 - RNA, 19 nt, synthetic construct
  source 1..19: mol_type = other RNA
agcagtagcccccaggccc

SEQ ID NO: 312 - RNA, 19 nt, synthetic construct
  source 1..19: mol_type = other RNA
gcagtagcccccaggccca

SEQ ID NO: 313 - RNA, 19 nt, synthetic construct
  source 1..19: mol_type = other RNA
cagtagcccccaggcccaa

SEQ ID NO: 314 - RNA, 19 nt, synthetic construct
  source 1..19: mol_type = other RNA
agtagcccccaggcccaag

SEQ ID NO: 315 - RNA, 19 nt, synthetic construct
  source 1..19: mol_type = other RNA
gtagcccccaggcccaagc

SEQ ID NO: 316 - RNA, 19 nt, synthetic construct
  source 1..19: mol_type = other RNA
tagcccccaggcccaagca

SEQ ID NO: 317 - RNA, 19 nt, synthetic construct
  source 1..19: mol_type = other RNA
agcccccaggcccaagcac

SEQ ID NO: 318 - RNA, 19 nt, synthetic construct
  source 1..19: mol_type = other RNA
gcccccaggcccaagcact

SEQ ID NO: 319 - RNA, 19 nt, synthetic construct
  source 1..19: mol_type = other RNA
cccccaggcccaagcactc

SEQ ID NO: 320 - RNA, 19 nt, synthetic construct
  source 1..19: mol_type = other RNA
ccccaggcccaagcactca

SEQ ID NO: 321 - RNA, 19 nt, synthetic construct
  source 1..19: mol_type = other RNA
cccaggcccaagcactcac

SEQ ID NO: 322 - RNA, 19 nt, synthetic construct
  source 1..19: mol_type = other RNA
ccaggcccaagcactcacc

SEQ ID NO: 323 - RNA, 19 nt, synthetic construct
  source 1..19: mol_type = other RNA
caggcccaagcactcaccg

SEQ ID NO: 324 - RNA, 19 nt, synthetic construct
  source 1..19: mol_type = other RNA
aggcccaagcactcaccga

SEQ ID NO: 325 - RNA, 19 nt, synthetic construct
  source 1..19: mol_type = other RNA
ggcccaagcactcaccgag

SEQ ID NO: 326 - RNA, 19 nt, synthetic construct
  source 1..19: mol_type = other RNA
gcccaagcactcaccgagg

SEQ ID NO: 327 - RNA, 19 nt, synthetic construct
  source 1..19: mol_type = other RNA
cccaagcactcaccgagga

SEQ ID NO: 328 - RNA, 19 nt, synthetic construct
  source 1..19: mol_type = other RNA
ccaagcactcaccgaggac

SEQ ID NO: 329 - RNA, 19 nt, synthetic construct
  source 1..19: mol_type = other RNA
caagcactcaccgaggacg

SEQ ID NO: 330 - RNA, 19 nt, synthetic construct
  source 1..19: mol_type = other RNA
aagcactcaccgaggacgg

SEQ ID NO: 331 - RNA, 19 nt, synthetic construct
  source 1..19: mol_type = other RNA
agcactcaccgaggacggg

SEQ ID NO: 332 - RNA, 19 nt, synthetic construct
  source 1..19: mol_type = other RNA
gcactcaccgaggacggga

SEQ ID NO: 333 - RNA, 19 nt, synthetic construct
  source 1..19: mol_type = other RNA
cactcaccgaggacgggag

SEQ ID NO: 334 - RNA, 19 nt, synthetic construct
  source 1..19: mol_type = other RNA
actcaccgaggacgggagg

SEQ ID NO: 335 - RNA, 19 nt, synthetic construct
  source 1..19: mol_type = other RNA
ctcaccgaggacgggaggc

SEQ ID NO: 336 - RNA, 19 nt, synthetic construct
  source 1..19: mol_type = other RNA
tcaccgaggacgggaggcc

SEQ ID NO: 337 - RNA, 19 nt, synthetic construct
  source 1..19: mol_type = other RNA
caccgaggacgggaggccc

SEQ ID NO: 338 - RNA, 19 nt, synthetic construct
  source 1..19: mol_type = other RNA
accgaggacgggaggccct

SEQ ID NO: 339 - RNA, 19 nt, synthetic construct
  source 1..19: mol_type = other RNA
ccgaggacgggaggccctg

SEQ ID NO: 340 - RNA, 19 nt, synthetic construct
  source 1..19: mol_type = other RNA
cgaggacgggaggccctgc

SEQ ID NO: 341 - RNA, 19 nt, synthetic construct
  source 1..19: mol_type = other RNA
gaggacgggaggccctgca

SEQ ID NO: 342 - RNA, 19 nt, synthetic construct
  source 1..19: mol_type = other RNA
aggacgggaggccctgcag

SEQ ID NO: 343 - RNA, 19 nt, synthetic construct
  source 1..19: mol_type = other RNA
ggacgggaggccctgcagg

SEQ ID NO: 344 - RNA, 19 nt, synthetic construct
  source 1..19: mol_type = other RNA
gacgggaggccctgcaggt

SEQ ID NO: 345 - RNA, 19 nt, synthetic construct
  source 1..19: mol_type = other RNA
acgggaggccctgcaggtt

SEQ ID NO: 346 - RNA, 19 nt, synthetic construct
  source 1..19: mol_type = other RNA
cgggaggccctgcaggttc

SEQ ID NO: 347 - RNA, 19 nt, synthetic construct
  source 1..19: mol_type = other RNA
gggaggccctgcaggttcc

SEQ ID NO: 348 - RNA, 19 nt, synthetic construct
  source 1..19: mol_type = other RNA
ggaggccctgcaggttccc

SEQ ID NO: 349 - RNA, 19 nt, synthetic construct
  source 1..19: mol_type = other RNA
gaggccctgcaggttcccc

SEQ ID NO: 350 - RNA, 19 nt, synthetic construct
  source 1..19: mol_type = other RNA
aggccctgcaggttcccct

SEQ ID NO: 351 - RNA, 19 nt, synthetic construct
  source 1..19: mol_type = other RNA
ggccctgcaggttcccctt

SEQ ID NO: 352 - RNA, 19 nt, synthetic construct
  source 1..19: mol_type = other RNA
gccctgcaggttccccttc

SEQ ID NO: 353 - RNA, 19 nt, synthetic construct
  source 1..19: mol_type = other RNA
ccctgcaggttccccttcc

SEQ ID NO: 354 - RNA, 19 nt, synthetic construct
  source 1..19: mol_type = other RNA
cctgcaggttccccttccg

SEQ ID NO: 355 - RNA, 19 nt, synthetic construct
  source 1..19: mol_type = other RNA
ctgcaggttccccttccgc

SEQ ID NO: 356 - RNA, 19 nt, synthetic construct
  source 1..19: mol_type = other RNA
tgcaggttccccttccgct

SEQ ID NO: 357 - RNA, 19 nt, synthetic construct
  source 1..19: mol_type = other RNA
gcaggttccccttccgcta

SEQ ID NO: 358 - RNA, 19 nt, synthetic construct
  source 1..19: mol_type = other RNA
caggttccccttccgctac

SEQ ID NO: 359 - RNA, 19 nt, synthetic construct
  source 1..19: mol_type = other RNA
aggttccccttccgctacg

SEQ ID NO: 360 - RNA, 19 nt, synthetic construct
  source 1..19: mol_type = other RNA
ggttccccttccgctacgg

SEQ ID NO: 361 - RNA, 19 nt, synthetic construct
  source 1..19: mol_type = other RNA
gttccccttccgctacggg

SEQ ID NO: 362 - RNA, 19 nt, synthetic construct
  source 1..19: mol_type = other RNA
ttccccttccgctacgggg

SEQ ID NO: 363 - RNA, 19 nt, synthetic construct
  source 1..19: mol_type = other RNA
tccccttccgctacggggg

SEQ ID NO: 364 - RNA, 19 nt, synthetic construct
  source 1..19: mol_type = other RNA
ccccttccgctacgggggc

SEQ ID NO: 365 - RNA, 19 nt, synthetic construct
  source 1..19: mol_type = other RNA
cccttccgctacgggggcc

SEQ ID NO: 366 - RNA, 19 nt, synthetic construct
  source 1..19: mol_type = other RNA
ccttccgctacgggggccg

SEQ ID NO: 367 - RNA, 19 nt, synthetic construct
  source 1..19: mol_type = other RNA
cttccgctacgggggccgc

SEQ ID NO: 368 - RNA, 19 nt, synthetic construct
  source 1..19: mol_type = other RNA
ttccgctacgggggccgca

SEQ ID NO: 369 - RNA, 19 nt, synthetic construct
  source 1..19: mol_type = other RNA
tccgctacgggggccgcat

SEQ ID NO: 370 - RNA, 19 nt, synthetic construct
  source 1..19: mol_type = other RNA
ccgctacgggggccgcatg

SEQ ID NO: 371 - RNA, 19 nt, synthetic construct
  source 1..19: mol_type = other RNA
cgctacgggggccgcatgc

SEQ ID NO: 372 - RNA, 19 nt, synthetic construct
  source 1..19: mol_type = other RNA
gctacgggggccgcatgct

SEQ ID NO: 373 - RNA, 19 nt, synthetic construct
  source 1..19: mol_type = other RNA
ctacgggggccgcatgctg

SEQ ID NO: 374 - RNA, 19 nt, synthetic construct
  source 1..19: mol_type = other RNA
tacgggggccgcatgctgc

SEQ ID NO: 375 - RNA, 19 nt, synthetic construct
  source 1..19: mol_type = other RNA
acgggggccgcatgctgca

SEQ ID NO: 376 - RNA, 19 nt, synthetic construct
  source 1..19: mol_type = other RNA
cgggggccgcatgctgcat

SEQ ID NO: 377 - RNA, 19 nt, synthetic construct
  source 1..19: mol_type = other RNA
gggggccgcatgctgcatg

SEQ ID NO: 378 - RNA, 19 nt, synthetic construct
  source 1..19: mol_type = other RNA
ggggccgcatgctgcatgc

SEQ ID NO: 379 - RNA, 19 nt, synthetic construct
  source 1..19: mol_type = other RNA
gggccgcatgctgcatgcc

SEQ ID NO: 380 - RNA, 19 nt, synthetic construct
  source 1..19: mol_type = other RNA
ggccgcatgctgcatgcct

SEQ ID NO: 381 - RNA, 19 nt, synthetic construct
  source 1..19: mol_type = other RNA
gccgcatgctgcatgcctg

SEQ ID NO: 382 - RNA, 19 nt, synthetic construct
  source 1..19: mol_type = other RNA
ccgcatgctgcatgcctgc

SEQ ID NO: 383 - RNA, 19 nt, synthetic construct
  source 1..19: mol_type = other RNA
cgcatgctgcatgcctgca

SEQ ID NO: 384 - RNA, 19 nt, synthetic construct
  source 1..19: mol_type = other RNA
gcatgctgcatgcctgcac

SEQ ID NO: 385 - RNA, 19 nt, synthetic construct
  source 1..19: mol_type = other RNA
catgctgcatgcctgcact

SEQ ID NO: 386 - RNA, 19 nt, synthetic construct
  source 1..19: mol_type = other RNA
atgctgcatgcctgcactt

SEQ ID NO: 387 - RNA, 19 nt, synthetic construct
  source 1..19: mol_type = other RNA
tgctgcatgcctgcacttc

SEQ ID NO: 388 - RNA, 19 nt, synthetic construct
  source 1..19: mol_type = other RNA
gctgcatgcctgcacttcg

SEQ ID NO: 389 - RNA, 19 nt, synthetic construct
  source 1..19: mol_type = other RNA
ctgcatgcctgcacttcgg

SEQ ID NO: 390 - RNA, 19 nt, synthetic construct
  source 1..19: mol_type = other RNA
tgcatgcctgcacttcgga

SEQ ID NO: 391 - RNA, 19 nt, synthetic construct
  source 1..19: mol_type = other RNA
gcatgcctgcacttcggag

SEQ ID NO: 392 - RNA, 19 nt, synthetic construct
  source 1..19: mol_type = other RNA
catgcctgcacttcggagg

SEQ ID NO: 393 - RNA, 19 nt, synthetic construct
  source 1..19: mol_type = other RNA
atgcctgcacttcggaggg

SEQ ID NO: 394 - RNA, 19 nt, synthetic construct
  source 1..19: mol_type = other RNA
tgcctgcacttcggagggc

SEQ ID NO: 395 - RNA, 19 nt, synthetic construct
  source 1..19: mol_type = other RNA
gcctgcacttcggagggca

SEQ ID NO: 396 - RNA, 19 nt, synthetic construct
  source 1..19: mol_type = other RNA
cctgcacttcggagggcag

SEQ ID NO: 397 - RNA, 19 nt, synthetic construct
  source 1..19: mol_type = other RNA
ctgcacttcggagggcagt

SEQ ID NO: 398 - RNA, 19 nt, synthetic construct
  source 1..19: mol_type = other RNA
tgcacttcggagggcagtg

SEQ ID NO: 399 - RNA, 19 nt, synthetic construct
  source 1..19: mol_type = other RNA
gcacttcggagggcagtgc

SEQ ID NO: 400 - RNA, 19 nt, synthetic construct
  source 1..19: mol_type = other RNA
cacttcggagggcagtgca

SEQ ID NO: 401 - RNA, 19 nt, synthetic construct
  source 1..19: mol_type = other RNA
acttcggagggcagtgcac

SEQ ID NO: 402 - RNA, 19 nt, synthetic construct
  source 1..19: mol_type = other RNA
cttcggagggcagtgcaca

SEQ ID NO: 403 - RNA, 19 nt, synthetic construct
  source 1..19: mol_type = other RNA
ttcggagggcagtgcacac

SEQ ID NO: 404 - RNA, 19 nt, synthetic construct
  source 1..19: mol_type = other RNA
tcggagggcagtgcacaca

SEQ ID NO: 405 - RNA, 19 nt, synthetic construct
  source 1..19: mol_type = other RNA
cggagggcagtgcacacag

SEQ ID NO: 406 - RNA, 19 nt, synthetic construct
  source 1..19: mol_type = other RNA
ggagggcagtgcacacagg

SEQ ID NO: 407 - RNA, 19 nt, synthetic construct
  source 1..19: mol_type = other RNA
gagggcagtgcacacagga

SEQ ID NO: 408 - RNA, 19 nt, synthetic construct
  source 1..19: mol_type = other RNA
agggcagtgcacacaggaa

SEQ ID NO: 409 - RNA, 19 nt, synthetic construct
  source 1..19: mol_type = other RNA
gggcagtgcacacaggaag

SEQ ID NO: 410 - RNA, 19 nt, synthetic construct
  source 1..19: mol_type = other RNA
ggcagtgcacacaggaagt

SEQ ID NO: 411 - RNA, 19 nt, synthetic construct
  source 1..19: mol_type = other RNA
gcagtgcacacaggaagtg

SEQ ID NO: 412 - RNA, 19 nt, synthetic construct
  source 1..19: mol_type = other RNA
cagtgcacacaggaagtgg

SEQ ID NO: 413 - RNA, 19 nt, synthetic construct
  source 1..19: mol_type = other RNA
agtgcacacaggaagtggt

SEQ ID NO: 414 - RNA, 19 nt, synthetic construct
  source 1..19: mol_type = other RNA
gtgcacacaggaagtggtg

SEQ ID NO: 415 - RNA, 19 nt, synthetic construct
  source 1..19: mol_type = other RNA
tgcacacaggaagtggtgt

SEQ ID NO: 416 - RNA, 19 nt, synthetic construct
  source 1..19: mol_type = other RNA
gcacacaggaagtggtgtg

SEQ ID NO: 417 - RNA, 19 nt, synthetic construct
  source 1..19: mol_type = other RNA
cacacaggaagtggtgtgc

SEQ ID NO: 418 - RNA, 19 nt, synthetic construct
  source 1..19: mol_type = other RNA
acacaggaagtggtgtgcc

SEQ ID NO: 419 - RNA, 19 nt, synthetic construct
  source 1..19: mol_type = other RNA
cacaggaagtggtgtgcca

SEQ ID NO: 420 - RNA, 19 nt, synthetic construct
  source 1..19: mol_type = other RNA
acaggaagtggtgtgccac

SEQ ID NO: 421 - RNA, 19 nt, synthetic construct
  source 1..19: mol_type = other RNA
caggaagtggtgtgccaca

SEQ ID NO: 422 - RNA, 19 nt, synthetic construct
  source 1..19: mol_type = other RNA
aggaagtggtgtgccacaa

SEQ ID NO: 423 - RNA, 19 nt, synthetic construct
  source 1..19: mol_type = other RNA
ggaagtggtgtgccacaac

SEQ ID NO: 424 - RNA, 19 nt, synthetic construct
  source 1..19: mol_type = other RNA
gaagtggtgtgccacaact

SEQ ID NO: 425 - RNA, 19 nt, synthetic construct
  source 1..19: mol_type = other RNA
aagtggtgtgccacaactc

SEQ ID NO: 426 - RNA, 19 nt, synthetic construct
  source 1..19: mol_type = other RNA
agtggtgtgccacaactca

SEQ ID NO: 427 - RNA, 19 nt, synthetic construct
  source 1..19: mol_type = other RNA
gtggtgtgccacaactcac

SEQ ID NO: 428 - RNA, 19 nt, synthetic construct
  source 1..19: mol_type = other RNA
tggtgtgccacaactcaca

SEQ ID NO: 429 - RNA, 19 nt, synthetic construct
  source 1..19: mol_type = other RNA
ggtgtgccacaactcacaa

SEQ ID NO: 430 - RNA, 19 nt, synthetic construct
  source 1..19: mol_type = other RNA
gtgtgccacaactcacaac

SEQ ID NO: 431 - RNA, 19 nt, synthetic construct
  source 1..19: mol_type = other RNA
tgtgccacaactcacaact

SEQ ID NO: 432 - RNA, 19 nt, synthetic construct
  source 1..19: mol_type = other RNA
gtgccacaactcacaacta

SEQ ID NO: 433 - RNA, 19 nt, synthetic construct
  source 1..19: mol_type = other RNA
tgccacaactcacaactac

SEQ ID NO: 434 - RNA, 19 nt, synthetic construct
  source 1..19: mol_type = other RNA
gccacaactcacaactacg

SEQ ID NO: 435 - RNA, 19 nt, synthetic construct
  source 1..19: mol_type = other RNA
ccacaactcacaactacga

SEQ ID NO: 436 - RNA, 19 nt, synthetic construct
  source 1..19: mol_type = other RNA
cacaactcacaactacgac

SEQ ID NO: 437 - RNA, 19 nt, synthetic construct
  source 1..19: mol_type = other RNA
acaactcacaactacgacc

SEQ ID NO: 438 - RNA, 19 nt, synthetic construct
  source 1..19: mol_type = other RNA
caactcacaactacgaccg

SEQ ID NO: 439 - RNA, 19 nt, synthetic construct
  source 1..19: mol_type = other RNA
aactcacaactacgaccgg

SEQ ID NO: 440 - RNA, 19 nt, synthetic construct
  source 1..19: mol_type = other RNA
actcacaactacgaccggg

SEQ ID NO: 441 - RNA, 19 nt, synthetic construct
  source 1..19: mol_type = other RNA
ctcacaactacgaccggga

SEQ ID NO: 442 - RNA, 19 nt, synthetic construct
  source 1..19: mol_type = other RNA
tcacaactacgaccgggac

SEQ ID NO: 443 - RNA, 19 nt, synthetic construct
  source 1..19: mol_type = other RNA
cacaactacgaccgggaca

SEQ ID NO: 444 - RNA, 19 nt, synthetic construct
  source 1..19: mol_type = other RNA
acaactacgaccgggacag

SEQ ID NO: 445 - RNA, 19 nt, synthetic construct
  source 1..19: mol_type = other RNA
caactacgaccgggacagg

SEQ ID NO: 446 - RNA, 19 nt, synthetic construct
  source 1..19: mol_type = other RNA
aactacgaccgggacaggg

SEQ ID NO: 447 - RNA, 19 nt, synthetic construct
  source 1..19: mol_type = other RNA
actacgaccgggacagggc

SEQ ID NO: 448 - RNA, 19 nt, synthetic construct
  source 1..19: mol_type = other RNA
ctacgaccgggacagggcc

SEQ ID NO: 449 - RNA, 19 nt, synthetic construct
  source 1..19: mol_type = other RNA
tacgaccgggacagggcct

SEQ ID NO: 450 - RNA, 19 nt, synthetic construct
  source 1..19: mol_type = other RNA
acgaccgggacagggcctg

SEQ ID NO: 451 - RNA, 19 nt, synthetic construct
  source 1..19: mol_type = other RNA
cgaccgggacagggcctgg

SEQ ID NO: 452 - RNA, 19 nt, synthetic construct
  source 1..19: mol_type = other RNA
gaccgggacagggcctggg

SEQ ID NO: 453 - RNA, 19 nt, synthetic construct
  source 1..19: mol_type = other RNA
accgggacagggcctgggg

SEQ ID NO: 454 - RNA, 19 nt, synthetic construct
  source 1..19: mol_type = other RNA
ccgggacagggcctggggc

SEQ ID NO: 455 - RNA, 19 nt, synthetic construct
  source 1..19: mol_type = other RNA
cgggacagggcctggggct

SEQ ID NO: 456 - RNA, 19 nt, synthetic construct
  source 1..19: mol_type = other RNA
gggacagggcctggggcta

SEQ ID NO: 457 - RNA, 19 nt, synthetic construct
  source 1..19: mol_type = other RNA
ggacagggcctggggctac

SEQ ID NO: 458 - RNA, 19 nt, synthetic construct
  source 1..19: mol_type = other RNA
gacagggcctggggctact

SEQ ID NO: 459 - RNA, 19 nt, synthetic construct
  source 1..19: mol_type = other RNA
acagggcctggggctactg

SEQ ID NO: 460 - RNA, 19 nt, synthetic construct
  source 1..19: mol_type = other RNA
cagggcctggggctactgt

SEQ ID NO: 461 - RNA, 19 nt, synthetic construct
  source 1..19: mol_type = other RNA
agggcctggggctactgtg

SEQ ID NO: 462 - RNA, 19 nt, synthetic construct
  source 1..19: mol_type = other RNA
gggcctggggctactgtgt

SEQ ID NO: 463 - RNA, 19 nt, synthetic construct
  source 1..19: mol_type = other RNA
ggcctggggctactgtgtg

SEQ ID NO: 464 - RNA, 19 nt, synthetic construct
  source 1..19: mol_type = other RNA
gcctggggctactgtgtgg

SEQ ID NO: 465 - RNA, 19 nt, synthetic construct
  source 1..19: mol_type = other RNA
cctggggctactgtgtgga

SEQ ID NO: 466 - RNA, 19 nt, synthetic construct
  source 1..19: mol_type = other RNA
ctggggctactgtgtggag

SEQ ID NO: 467 - RNA, 19 nt, synthetic construct
  source 1..19: mol_type = other RNA
tggggctactgtgtggagg

SEQ ID NO: 468 - RNA, 19 nt, synthetic construct
  source 1..19: mol_type = other RNA
ggggctactgtgtggaggc

SEQ ID NO: 469 - RNA, 19 nt, synthetic construct
  source 1..19: mol_type = other RNA
gggctactgtgtggaggcc

SEQ ID NO: 470 - RNA, 19 nt, synthetic construct
  source 1..19: mol_type = other RNA
ggctactgtgtggaggcca

SEQ ID NO: 471 - RNA, 19 nt, synthetic construct
  source 1..19: mol_type = other RNA
gctactgtgtggaggccac

SEQ ID NO: 472 - RNA, 19 nt, synthetic construct
  source 1..19: mol_type = other RNA
ctactgtgtggaggccacc

SEQ ID NO: 473 - RNA, 19 nt, synthetic construct
  source 1..19: mol_type = other RNA
tactgtgtggaggccaccc

SEQ ID NO: 474 - RNA, 19 nt, synthetic construct
  source 1..19: mol_type = other RNA
actgtgtggaggccacccc

SEQ ID NO: 475 - RNA, 19 nt, synthetic construct
  source 1..19: mol_type = other RNA
ctgtgtggaggccaccccg

SEQ ID NO: 476 - RNA, 19 nt, synthetic construct
  source 1..19: mol_type = other RNA
tgtgtggaggccaccccgc

SEQ ID NO: 477 - RNA, 19 nt, synthetic construct
  source 1..19: mol_type = other RNA
gtgtggaggccaccccgcc

SEQ ID NO: 478 - RNA, 19 nt, synthetic construct
  source 1..19: mol_type = other RNA
tgtggaggccaccccgcct

SEQ ID NO: 479 - RNA, 19 nt, synthetic construct
  source 1..19: mol_type = other RNA
gtggaggccaccccgcctc

SEQ ID NO: 480 - RNA, 19 nt, synthetic construct
  source 1..19: mol_type = other RNA
tggaggccaccccgcctcc

SEQ ID NO: 481 - RNA, 19 nt, synthetic construct
  source 1..19: mol_type = other RNA
ggaggccaccccgcctcca

SEQ ID NO: 482 - RNA, 19 nt, synthetic construct
  source 1..19: mol_type = other RNA
gaggccaccccgcctccag

SEQ ID NO: 483 - RNA, 19 nt, synthetic construct
  source 1..19: mol_type = other RNA
aggccaccccgcctccagg

SEQ ID NO: 484 - RNA, 19 nt, synthetic construct
  source 1..19: mol_type = other RNA
ggccaccccgcctccaggg

SEQ ID NO: 485 - RNA, 19 nt, synthetic construct
  source 1..19: mol_type = other RNA
gccaccccgcctccagggg

SEQ ID NO: 486 - RNA, 19 nt, synthetic construct
  source 1..19: mol_type = other RNA
ccaccccgcctccaggggg

SEQ ID NO: 487 - RNA, 19 nt, synthetic construct
  source 1..19: mol_type = other RNA
caccccgcctccagggggc

SEQ ID NO: 488 - RNA, 19 nt, synthetic construct
  source 1..19: mol_type = other RNA
accccgcctccagggggcc

SEQ ID NO: 489 - RNA, 19 nt, synthetic construct
  source 1..19: mol_type = other RNA
ccccgcctccagggggccc

SEQ ID NO: 490 - RNA, 19 nt, synthetic construct
  source 1..19: mol_type = other RNA
cccgcctccagggggccca

SEQ ID NO: 491 - RNA, 19 nt, synthetic construct
  source 1..19: mol_type = other RNA
ccgcctccagggggcccag

SEQ ID NO: 492 - RNA, 19 nt, synthetic construct
  source 1..19: mol_type = other RNA
cgcctccagggggcccagc

SEQ ID NO: 493 - RNA, 19 nt, synthetic construct
  source 1..19: mol_type = other RNA
gcctccagggggcccagct

SEQ ID NO: 494 - RNA, 19 nt, synthetic construct
  source 1..19: mol_type = other RNA
cctccagggggcccagctg

SEQ ID NO: 495 - RNA, 19 nt, synthetic construct
  source 1..19: mol_type = other RNA
ctccagggggcccagctgc

SEQ ID NO: 496 - RNA, 19 nt, synthetic construct
  source 1..19: mol_type = other RNA
tccagggggcccagctgcc

SEQ ID NO: 497 - RNA, 19 nt, synthetic construct
  source 1..19: mol_type = other RNA
ccagggggcccagctgccc

SEQ ID NO: 498 - RNA, 19 nt, synthetic construct
  source 1..19: mol_type = other RNA
cagggggcccagctgccct

SEQ ID NO: 499 - RNA, 19 nt, synthetic construct
  source 1..19: mol_type = other RNA
agggggcccagctgccctg

SEQ ID NO: 500 - RNA, 19 nt, synthetic construct
  source 1..19: mol_type = other RNA
gggggcccagctgccctgg

SEQ ID NO: 501 - RNA, 19 nt, synthetic construct
  source 1..19: mol_type = other RNA
ggggcccagctgccctgga

SEQ ID NO: 502 - RNA, 19 nt, synthetic construct
  source 1..19: mol_type = other RNA
gggcccagctgccctggat

SEQ ID NO: 503 - RNA, 19 nt, synthetic construct
  source 1..19: mol_type = other RNA
ggcccagctgccctggatc

SEQ ID NO: 504 - RNA, 19 nt, synthetic construct
  source 1..19: mol_type = other RNA
gcccagctgccctggatcc

SEQ ID NO: 505 - RNA, 19 nt, synthetic construct
  source 1..19: mol_type = other RNA
cccagctgccctggatccc

SEQ ID NO: 506 - RNA, 19 nt, synthetic construct
  source 1..19: mol_type = other RNA
ccagctgccctggatccct

SEQ ID NO: 507 - RNA, 19 nt, synthetic construct
  source 1..19: mol_type = other RNA
cagctgccctggatccctg

SEQ ID NO: 508 - RNA, 19 nt, synthetic construct
  source 1..19: mol_type = other RNA
agctgccctggatccctgt

SEQ ID NO: 509 - RNA, 19 nt, synthetic construct
  source 1..19: mol_type = other RNA
gctgccctggatccctgtg

SEQ ID NO: 510 - RNA, 19 nt, synthetic construct
  source 1..19: mol_type = other RNA
ctgccctggatccctgtgc

SEQ ID NO: 511 - RNA, 19 nt, synthetic construct
  source 1..19: mol_type = other RNA
tgccctggatccctgtgcc

SEQ ID NO: 512 - RNA, 19 nt, synthetic construct
  source 1..19: mol_type = other RNA
gccctggatccctgtgcct

SEQ ID NO: 513 - RNA, 19 nt, synthetic construct
  source 1..19: mol_type = other RNA
ccctggatccctgtgcctc

SEQ ID NO: 514 - RNA, 19 nt, synthetic construct
  source 1..19: mol_type = other RNA
cctggatccctgtgcctcc

SEQ ID NO: 515 - RNA, 19 nt, synthetic construct
  source 1..19: mol_type = other RNA
ctggatccctgtgcctccg

SEQ ID NO: 516 - RNA, 19 nt, synthetic construct
  source 1..19: mol_type = other RNA
tggatccctgtgcctccgg

SEQ ID NO: 517 - RNA, 19 nt, synthetic construct
  source 1..19: mol_type = other RNA
ggatccctgtgcctccggc

SEQ ID NO: 518 - RNA, 19 nt, synthetic construct
  source 1..19: mol_type = other RNA
gatccctgtgcctccggcc

SEQ ID NO: 519 - RNA, 19 nt, synthetic construct
  source 1..19: mol_type = other RNA
atccctgtgcctccggccc

SEQ ID NO: 520 - RNA, 19 nt, synthetic construct
  source 1..19: mol_type = other RNA
tccctgtgcctccggcccc

SEQ ID NO: 521 - RNA, 19 nt, synthetic construct
  source 1..19: mol_type = other RNA
ccctgtgcctccggcccct

SEQ ID NO: 522 - RNA, 19 nt, synthetic construct
  source 1..19: mol_type = other RNA
cctgtgcctccggcccctg

SEQ ID NO: 523 - RNA, 19 nt, synthetic construct
  source 1..19: mol_type = other RNA
ctgtgcctccggcccctgc

SEQ ID NO: 524 - RNA, 19 nt, synthetic construct
  source 1..19: mol_type = other RNA
tgtgcctccggcccctgcc

SEQ ID NO: 525 - RNA, 19 nt, synthetic construct
  source 1..19: mol_type = other RNA
gtgcctccggcccctgcct

SEQ ID NO: 526 - RNA, 19 nt, synthetic construct
  source 1..19: mol_type = other RNA
tgcctccggcccctgcctc

SEQ ID NO: 527 - RNA, 19 nt, synthetic construct
  source 1..19: mol_type = other RNA
gcctccggcccctgcctca

SEQ ID NO: 528 - RNA, 19 nt, synthetic construct
  source 1..19: mol_type = other RNA
cctccggcccctgcctcaa

SEQ ID NO: 529 - RNA, 19 nt, synthetic construct
  source 1..19: mol_type = other RNA
ctccggcccctgcctcaat

SEQ ID NO: 530 - RNA, 19 nt, synthetic construct
  source 1..19: mol_type = other RNA
tccggcccctgcctcaatg

SEQ ID NO: 531 - RNA, 19 nt, synthetic construct
  source 1..19: mol_type = other RNA
ccggcccctgcctcaatgg

SEQ ID NO: 532 - RNA, 19 nt, synthetic construct
  source 1..19: mol_type = other RNA
cggcccctgcctcaatgga

SEQ ID NO: 533 - RNA, 19 nt, synthetic construct
  source 1..19: mol_type = other RNA
ggcccctgcctcaatggag

SEQ ID NO: 534 - RNA, 19 nt, synthetic construct
  source 1..19: mol_type = other RNA
gcccctgcctcaatggagg

SEQ ID NO: 535 - RNA, 19 nt, synthetic construct
  source 1..19: mol_type = other RNA
cccctgcctcaatggaggc

SEQ ID NO: 536 - RNA, 19 nt, synthetic construct
  source 1..19: mol_type = other RNA
ccctgcctcaatggaggct

SEQ ID NO: 537 - RNA, 19 nt, synthetic construct
  source 1..19: mol_type = other RNA
cctgcctcaatggaggctc

SEQ ID NO: 538 - RNA, 19 nt, synthetic construct
  source 1..19: mol_type = other RNA
ctgcctcaatggaggctcc

SEQ ID NO: 539 - RNA, 19 nt, synthetic construct
  source 1..19: mol_type = other RNA
tgcctcaatggaggctcct

SEQ ID NO: 540 - RNA, 19 nt, synthetic construct
  source 1..19: mol_type = other RNA
gcctcaatggaggctcctg

SEQ ID NO: 541 - RNA, 19 nt, synthetic construct
  source 1..19: mol_type = other RNA
cctcaatggaggctcctgc

SEQ ID NO: 542 - RNA, 19 nt, synthetic construct
  source 1..19: mol_type = other RNA
ctcaatggaggctcctgct

SEQ ID NO: 543 - RNA, 19 nt, synthetic construct
  source 1..19: mol_type = other RNA
tcaatggaggctcctgctc

SEQ ID NO: 544 - RNA, 19 nt, synthetic construct
  source 1..19: mol_type = other RNA
caatggaggctcctgctcc

SEQ ID NO: 545 - RNA, 19 nt, synthetic construct
  source 1..19: mol_type = other RNA
aatggaggctcctgctcca

SEQ ID NO: 546 - RNA, 19 nt, synthetic construct
  source 1..19: mol_type = other RNA
atggaggctcctgctccaa

SEQ ID NO: 547 - RNA, 19 nt, synthetic construct
  source 1..19: mol_type = other RNA
tggaggctcctgctccaat

SEQ ID NO: 548 - RNA, 19 nt, synthetic construct
  source 1..19: mol_type = other RNA
ggaggctcctgctccaata

SEQ ID NO: 549 - RNA, 19 nt, synthetic construct
  source 1..19: mol_type = other RNA
gaggctcctgctccaatac

SEQ ID NO: 550 - RNA, 19 nt, synthetic construct
  source 1..19: mol_type = other RNA
aggctcctgctccaatacc

SEQ ID NO: 551 - RNA, 19 nt, synthetic construct
  source 1..19: mol_type = other RNA
ggctcctgctccaataccc

SEQ ID NO: 552 - RNA, 19 nt, synthetic construct
  source 1..19: mol_type = other RNA
gctcctgctccaataccca

SEQ ID NO: 553 - RNA, 19 nt, synthetic construct
  source 1..19: mol_type = other RNA
ctcctgctccaatacccag

SEQ ID NO: 554 - RNA, 19 nt, synthetic construct
  source 1..19: mol_type = other RNA
tcctgctccaatacccagg

SEQ ID NO: 555 - RNA, 19 nt, synthetic construct
  source 1..19: mol_type = other RNA
cctgctccaatacccagga

SEQ ID NO: 556 - RNA, 19 nt, synthetic construct
  source 1..19: mol_type = other RNA
ctgctccaatacccaggac

SEQ ID NO: 557 - RNA, 19 nt, synthetic construct
  source 1..19: mol_type = other RNA
tgctccaatacccaggacc

SEQ ID NO: 558 - RNA, 19 nt, synthetic construct
  source 1..19: mol_type = other RNA
gctccaatacccaggaccc

SEQ ID NO: 559 - RNA, 19 nt, synthetic construct
  source 1..19: mol_type = other RNA
ctccaatacccaggacccc

SEQ ID NO: 560 - RNA, 19 nt, synthetic construct
  source 1..19: mol_type = other RNA
tccaatacccaggaccccc

SEQ ID NO: 561 - RNA, 19 nt, synthetic construct
  source 1..19: mol_type = other RNA
ccaatacccaggaccccca

SEQ ID NO: 562 - RNA, 19 nt, synthetic construct
  source 1..19: mol_type = other RNA
caatacccaggacccccag

SEQ ID NO: 563 - RNA, 19 nt, synthetic construct
  source 1..19: mol_type = other RNA
aatacccaggacccccagt

SEQ ID NO: 564 - RNA, 19 nt, synthetic construct
  source 1..19: mol_type = other RNA
atacccaggacccccagtc

SEQ ID NO: 565 - RNA, 19 nt, synthetic construct
  source 1..19: mol_type = other RNA
tacccaggacccccagtcc

SEQ ID NO: 566 - RNA, 19 nt, synthetic construct
  source 1..19: mol_type = other RNA
acccaggacccccagtcct

SEQ ID NO: 567 - RNA, 19 nt, synthetic construct
  source 1..19: mol_type = other RNA
cccaggacccccagtccta

SEQ ID NO: 568 - RNA, 19 nt, synthetic construct
  source 1..19: mol_type = other RNA
ccaggacccccagtcctat

SEQ ID NO: 569 - RNA, 19 nt, synthetic construct
  source 1..19: mol_type = other RNA
caggacccccagtcctatc

SEQ ID NO: 570 - RNA, 19 nt, synthetic construct
  source 1..19: mol_type = other RNA
aggacccccagtcctatca

SEQ ID NO: 571 - RNA, 19 nt, synthetic construct
  source 1..19: mol_type = other RNA
ggacccccagtcctatcac

SEQ ID NO: 572 - RNA, 19 nt, synthetic construct
  source 1..19: mol_type = other RNA
gacccccagtcctatcact

SEQ ID NO: 573 - RNA, 19 nt, synthetic construct
  source 1..19: mol_type = other RNA
acccccagtcctatcactg

SEQ ID NO: 574 - RNA, 19 nt, synthetic construct
  source 1..19: mol_type = other RNA
cccccagtcctatcactgc

SEQ ID NO: 575 - RNA, 19 nt, synthetic construct
  source 1..19: mol_type = other RNA
ccccagtcctatcactgca

SEQ ID NO: 576 - RNA, 19 nt, synthetic construct
  source 1..19: mol_type = other RNA
cccagtcctatcactgcag

SEQ ID NO: 577 - RNA, 19 nt, synthetic construct
  source 1..19: mol_type = other RNA
ccagtcctatcactgcagc

SEQ ID NO: 578 - RNA, 19 nt, synthetic construct
  source 1..19: mol_type = other RNA
cagtcctatcactgcagct

SEQ ID NO: 579 - RNA, 19 nt, synthetic construct
  source 1..19: mol_type = other RNA
agtcctatcactgcagctg

SEQ ID NO: 580 - RNA, 19 nt, synthetic construct
  source 1..19: mol_type = other RNA
gtcctatcactgcagctgc

SEQ ID NO: 581 - RNA, 19 nt, synthetic construct
  source 1..19: mol_type = other RNA
tcctatcactgcagctgcc

SEQ ID NO: 582 - RNA, 19 nt, synthetic construct
  source 1..19: mol_type = other RNA
cctatcactgcagctgccc

SEQ ID NO: 583 - RNA, 19 nt, synthetic construct
  source 1..19: mol_type = other RNA
ctatcactgcagctgcccc

SEQ ID NO: 584 - RNA, 19 nt, synthetic construct
  source 1..19: mol_type = other RNA
tatcactgcagctgccccc

SEQ ID NO: 585 - RNA, 19 nt, synthetic construct
  source 1..19: mol_type = other RNA
atcactgcagctgcccccg

SEQ ID NO: 586 - RNA, 19 nt, synthetic construct
  source 1..19: mol_type = other RNA
tcactgcagctgcccccgg

SEQ ID NO: 587 - RNA, 19 nt, synthetic construct
  source 1..19: mol_type = other RNA
cactgcagctgcccccggg

SEQ ID NO: 588 - RNA, 19 nt, synthetic construct
  source 1..19: mol_type = other RNA
actgcagctgcccccgggc

SEQ ID NO: 589 - RNA, 19 nt, synthetic construct
  source 1..19: mol_type = other RNA
ctgcagctgcccccgggcc

SEQ ID NO: 590 - RNA, 19 nt, synthetic construct
  source 1..19: mol_type = other RNA
tgcagctgcccccgggcct

SEQ ID NO: 591 - RNA, 19 nt, synthetic construct
  source 1..19: mol_type = other RNA
gcagctgcccccgggcctt

SEQ ID NO: 592 - RNA, 19 nt, synthetic construct
  source 1..19: mol_type = other RNA
cagctgcccccgggccttc

SEQ ID NO: 593 - RNA, 19 nt, synthetic construct
  source 1..19: mol_type = other RNA
agctgcccccgggccttca

SEQ ID NO: 594 - RNA, 19 nt, synthetic construct
  source 1..19: mol_type = other RNA
gctgcccccgggccttcac

SEQ ID NO: 595 - RNA, 19 nt, synthetic construct
  source 1..19: mol_type = other RNA
ctgcccccgggccttcacc

SEQ ID NO: 596 - RNA, 19 nt, synthetic construct
  source 1..19: mol_type = other RNA
tgcccccgggccttcaccg

SEQ ID NO: 597 - RNA, 19 nt, synthetic construct
  source 1..19: mol_type = other RNA
gcccccgggccttcaccgg

SEQ ID NO: 598 - RNA, 19 nt, synthetic construct
  source 1..19: mol_type = other RNA
cccccgggccttcaccggc

SEQ ID NO: 599 - RNA, 19 nt, synthetic construct
  source 1..19: mol_type = other RNA
ccccgggccttcaccggca

SEQ ID NO: 600 - RNA, 19 nt, synthetic construct
  source 1..19: mol_type = other RNA
cccgggccttcaccggcaa

SEQ ID NO: 601 - RNA, 19 nt, synthetic construct
  source 1..19: mol_type = other RNA
ccgggccttcaccggcaag

SEQ ID NO: 602 - RNA, 19 nt, synthetic construct
  source 1..19: mol_type = other RNA
cgggccttcaccggcaagg

SEQ ID NO: 603 - RNA, 19 nt, synthetic construct
  source 1..19: mol_type = other RNA
gggccttcaccggcaagga

SEQ ID NO: 604 - RNA, 19 nt, synthetic construct
  source 1..19: mol_type = other RNA
ggccttcaccggcaaggac

SEQ ID NO: 605 - RNA, 19 nt, synthetic construct
  source 1..19: mol_type = other RNA
gccttcaccggcaaggact

SEQ ID NO: 606 - RNA, 19 nt, synthetic construct
  source 1..19: mol_type = other RNA
ccttcaccggcaaggactg

SEQ ID NO: 607 - RNA, 19 nt, synthetic construct
  source 1..19: mol_type = other RNA
cttcaccggcaaggactgc

SEQ ID NO: 608 - RNA, 19 nt, synthetic construct
  source 1..19: mol_type = other RNA
ttcaccggcaaggactgcg

SEQ ID NO: 609 - RNA, 19 nt, synthetic construct
  source 1..19: mol_type = other RNA
tcaccggcaaggactgcgg

SEQ ID NO: 610 - RNA, 19 nt, synthetic construct
  source 1..19: mol_type = other RNA
caccggcaaggactgcggc

SEQ ID NO: 611 - RNA, 19 nt, synthetic construct
  source 1..19: mol_type = other RNA
accggcaaggactgcggca

SEQ ID NO: 612 - RNA, 19 nt, synthetic construct
  source 1..19: mol_type = other RNA
ccggcaaggactgcggcac

SEQ ID NO: 613 - RNA, 19 nt, synthetic construct
  source 1..19: mol_type = other RNA
cggcaaggactgcggcaca

SEQ ID NO: 614 - RNA, 19 nt, synthetic construct
  source 1..19: mol_type = other RNA
ggcaaggactgcggcacag

SEQ ID NO: 615 - RNA, 19 nt, synthetic construct
  source 1..19: mol_type = other RNA
gcaaggactgcggcacaga

SEQ ID NO: 616 - RNA, 19 nt, synthetic construct
  source 1..19: mol_type = other RNA
caaggactgcggcacagag

SEQ ID NO: 617 - RNA, 19 nt, synthetic construct
  source 1..19: mol_type = other RNA
aaggactgcggcacagaga

SEQ ID NO: 618 - RNA, 19 nt, synthetic construct
  source 1..19: mol_type = other RNA
aggactgcggcacagagaa

SEQ ID NO: 619 - RNA, 19 nt, synthetic construct
  source 1..19: mol_type = other RNA
ggactgcggcacagagaaa

SEQ ID NO: 620 - RNA, 19 nt, synthetic construct
  source 1..19: mol_type = other RNA
gactgcggcacagagaaat

SEQ ID NO: 621 - RNA, 19 nt, synthetic construct
  source 1..19: mol_type = other RNA
actgcggcacagagaaatg

SEQ ID NO: 622 - RNA, 19 nt, synthetic construct
  source 1..19: mol_type = other RNA
ctgcggcacagagaaatgc

SEQ ID NO: 623 - RNA, 19 nt, synthetic construct
  source 1..19: mol_type = other RNA
tgcggcacagagaaatgct

SEQ ID NO: 624 - RNA, 19 nt, synthetic construct
  source 1..19: mol_type = other RNA
gcggcacagagaaatgctt

SEQ ID NO: 625 - RNA, 19 nt, synthetic construct
  source 1..19: mol_type = other RNA
cggcacagagaaatgcttt

SEQ ID NO: 626 - RNA, 19 nt, synthetic construct
  source 1..19: mol_type = other RNA
ggcacagagaaatgctttg

SEQ ID NO: 627 - RNA, 19 nt, synthetic construct
  source 1..19: mol_type = other RNA
gcacagagaaatgctttga

SEQ ID NO: 628 - RNA, 19 nt, synthetic construct
  source 1..19: mol_type = other RNA
cacagagaaatgctttgat

SEQ ID NO: 629 - RNA, 19 nt, synthetic construct
  source 1..19: mol_type = other RNA
acagagaaatgctttgatg

SEQ ID NO: 630 - RNA, 19 nt, synthetic construct
  source 1..19: mol_type = other RNA
cagagaaatgctttgatga

SEQ ID NO: 631 - RNA, 19 nt, synthetic construct
  source 1..19: mol_type = other RNA
agagaaatgctttgatgag

SEQ ID NO: 632 - RNA, 19 nt, synthetic construct
  source 1..19: mol_type = other RNA
gagaaatgctttgatgaga

SEQ ID NO: 633 - RNA, 19 nt, synthetic construct
  source 1..19: mol_type = other RNA
agaaatgctttgatgagac

SEQ ID NO: 634 - RNA, 19 nt, synthetic construct
  source 1..19: mol_type = other RNA
gaaatgctttgatgagacc

SEQ ID NO: 635 - RNA, 19 nt, synthetic construct
  source 1..19: mol_type = other RNA
aaatgctttgatgagaccc

SEQ ID NO: 636 - RNA, 19 nt, synthetic construct
  source 1..19: mol_type = other RNA
aatgctttgatgagacccg

SEQ ID NO: 637 - RNA, 19 nt, synthetic construct
  source 1..19: mol_type = other RNA
atgctttgatgagacccgc

SEQ ID NO: 638 - RNA, 19 nt, synthetic construct
  source 1..19: mol_type = other RNA
tgctttgatgagacccgct

SEQ ID NO: 639 - RNA, 19 nt, synthetic construct
  source 1..19: mol_type = other RNA
gctttgatgagacccgcta

SEQ ID NO: 640 - RNA, 19 nt, synthetic construct
  source 1..19: mol_type = other RNA
ctttgatgagacccgctac

SEQ ID NO: 641 - RNA, 19 nt, synthetic construct
  source 1..19: mol_type = other RNA
tttgatgagacccgctacg

SEQ ID NO: 642 - RNA, 19 nt, synthetic construct
  source 1..19: mol_type = other RNA
ttgatgagacccgctacga

SEQ ID NO: 643 - RNA, 19 nt, synthetic construct
  source 1..19: mol_type = other RNA
tgatgagacccgctacgag

SEQ ID NO: 644 - RNA, 19 nt, synthetic construct
  source 1..19: mol_type = other RNA
gatgagacccgctacgagt

SEQ ID NO: 645 - RNA, 19 nt, synthetic construct
  source 1..19: mol_type = other RNA
atgagacccgctacgagta

SEQ ID NO: 646 - RNA, 19 nt, synthetic construct
  source 1..19: mol_type = other RNA
tgagacccgctacgagtac

SEQ ID NO: 647 - RNA, 19 nt, synthetic construct
  source 1..19: mol_type = other RNA
gagacccgctacgagtacc

SEQ ID NO: 648 - RNA, 19 nt, synthetic construct
  source 1..19: mol_type = other RNA
agacccgctacgagtacct

SEQ ID NO: 649 - RNA, 19 nt, synthetic construct
  source 1..19: mol_type = other RNA
gacccgctacgagtacctg

SEQ ID NO: 650 - RNA, 19 nt, synthetic construct
  source 1..19: mol_type = other RNA
acccgctacgagtacctgg

SEQ ID NO: 651 - RNA, 19 nt, synthetic construct
  source 1..19: mol_type = other RNA
cccgctacgagtacctgga

SEQ ID NO: 652 - RNA, 19 nt, synthetic construct
  source 1..19: mol_type = other RNA
ccgctacgagtacctggag

SEQ ID NO: 653 - RNA, 19 nt, synthetic construct
  source 1..19: mol_type = other RNA
cgctacgagtacctggagg

SEQ ID NO: 654 - RNA, 19 nt, synthetic construct
  source 1..19: mol_type = other RNA
gctacgagtacctggaggg

SEQ ID NO: 655 - RNA, 19 nt, synthetic construct
  source 1..19: mol_type = other RNA
ctacgagtacctggagggg

SEQ ID NO: 656 - RNA, 19 nt, synthetic construct
  source 1..19: mol_type = other RNA
tacgagtacctggaggggg

SEQ ID NO: 657 - RNA, 19 nt, synthetic construct
  source 1..19: mol_type = other RNA
acgagtacctggagggggg

SEQ ID NO: 658 - RNA, 19 nt, synthetic construct
  source 1..19: mol_type = other RNA
cgagtacctggaggggggc

SEQ ID NO: 659 - RNA, 19 nt, synthetic construct
  source 1..19: mol_type = other RNA
gagtacctggaggggggcg

SEQ ID NO: 660 - RNA, 19 nt, synthetic construct
  source 1..19: mol_type = other RNA
agtacctggaggggggcga

SEQ ID NO: 661 - RNA, 19 nt, synthetic construct
  source 1..19: mol_type = other RNA
gtacctggaggggggcgac

SEQ ID NO: 662 - RNA, 19 nt, synthetic construct
  source 1..19: mol_type = other RNA
tacctggaggggggcgacc

SEQ ID NO: 663 - RNA, 19 nt, synthetic construct
  source 1..19: mol_type = other RNA
acctggaggggggcgaccg

SEQ ID NO: 664 - RNA, 19 nt, synthetic construct
  source 1..19: mol_type = other RNA
cctggaggggggcgaccgc

SEQ ID NO: 665 - RNA, 19 nt, synthetic construct
  source 1..19: mol_type = other RNA
ctggaggggggcgaccgct

SEQ ID NO: 666 - RNA, 19 nt, synthetic construct
  source 1..19: mol_type = other RNA
tggaggggggcgaccgctg

SEQ ID NO: 667 - RNA, 19 nt, synthetic construct
  source 1..19: mol_type = other RNA
ggaggggggcgaccgctgg

SEQ ID NO: 668 - RNA, 19 nt, synthetic construct
  source 1..19: mol_type = other RNA
gaggggggcgaccgctggg

SEQ ID NO: 669 - RNA, 19 nt, synthetic construct
  source 1..19: mol_type = other RNA
aggggggcgaccgctgggc

SEQ ID NO: 670 - RNA, 19 nt, synthetic construct
  source 1..19: mol_type = other RNA
ggggggcgaccgctgggcc

SEQ ID NO: 671 - RNA, 19 nt, synthetic construct
  source 1..19: mol_type = other RNA
gggggcgaccgctgggccc

SEQ ID NO: 672 - RNA, 19 nt, synthetic construct
  source 1..19: mol_type = other RNA
ggggcgaccgctgggcccg

SEQ ID NO: 673 - RNA, 19 nt, synthetic construct
  source 1..19: mol_type = other RNA
gggcgaccgctgggcccgc

SEQ ID NO: 674 - RNA, 19 nt, synthetic construct
  source 1..19: mol_type = other RNA
ggcgaccgctgggcccgcg

SEQ ID NO: 675 - RNA, 19 nt, synthetic construct
  source 1..19: mol_type = other RNA
gcgaccgctgggcccgcgt

SEQ ID NO: 676 - RNA, 19 nt, synthetic construct
  source 1..19: mol_type = other RNA
cgaccgctgggcccgcgtg

SEQ ID NO: 677 - RNA, 19 nt, synthetic construct
  source 1..19: mol_type = other RNA
gaccgctgggcccgcgtgc

SEQ ID NO: 678 - RNA, 19 nt, synthetic construct
  source 1..19: mol_type = other RNA
accgctgggcccgcgtgcg

SEQ ID NO: 679 - RNA, 19 nt, synthetic construct
  source 1..19: mol_type = other RNA
ccgctgggcccgcgtgcgc

SEQ ID NO: 680 - RNA, 19 nt, synthetic construct
  source 1..19: mol_type = other RNA
cgctgggcccgcgtgcgcc

SEQ ID NO: 681 - RNA, 19 nt, synthetic construct
  source 1..19: mol_type = other RNA
gctgggcccgcgtgcgcca

SEQ ID NO: 682 - RNA, 19 nt, synthetic construct
  source 1..19: mol_type = other RNA
ctgggcccgcgtgcgccag

SEQ ID NO: 683 - RNA, 19 nt, synthetic construct
  source 1..19: mol_type = other RNA
tgggcccgcgtgcgccagg

SEQ ID NO: 684 - RNA, 19 nt, synthetic construct
  source 1..19: mol_type = other RNA
gggcccgcgtgcgccaggg

SEQ ID NO: 685 - RNA, 19 nt, synthetic construct
  source 1..19: mol_type = other RNA
ggcccgcgtgcgccagggc

SEQ ID NO: 686 - RNA, 19 nt, synthetic construct
  source 1..19: mol_type = other RNA
gcccgcgtgcgccagggcc

SEQ ID NO: 687 - RNA, 19 nt, synthetic construct
  source 1..19: mol_type = other RNA
cccgcgtgcgccagggcca

SEQ ID NO: 688 - RNA, 19 nt, synthetic construct
  source 1..19: mol_type = other RNA
ccgcgtgcgccagggccac

SEQ ID NO: 689 - RNA, 19 nt, synthetic construct
  source 1..19: mol_type = other RNA
cgcgtgcgccagggccacg

SEQ ID NO: 690 - RNA, 19 nt, synthetic construct
  source 1..19: mol_type = other RNA
gcgtgcgccagggccacgt

SEQ ID NO: 691 - RNA, 19 nt, synthetic construct
  source 1..19: mol_type = other RNA
cgtgcgccagggccacgtg

SEQ ID NO: 692 - RNA, 19 nt, synthetic construct
  source 1..19: mol_type = other RNA
gtgcgccagggccacgtgg

SEQ ID NO: 693 - RNA, 19 nt, synthetic construct
  source 1..19: mol_type = other RNA
tgcgccagggccacgtgga

SEQ ID NO: 694 - RNA, 19 nt, synthetic construct
  source 1..19: mol_type = other RNA
gcgccagggccacgtggaa

SEQ ID NO: 695 - RNA, 19 nt, synthetic construct
  source 1..19: mol_type = other RNA
cgccagggccacgtggaac

SEQ ID NO: 696 - RNA, 19 nt, synthetic construct
  source 1..19: mol_type = other RNA
gccagggccacgtggaaca

SEQ ID NO: 697 - RNA, 19 nt, synthetic construct
  source 1..19: mol_type = other RNA
ccagggccacgtggaacag

SEQ ID NO: 698 - RNA, 19 nt, synthetic construct
  source 1..19: mol_type = other RNA
cagggccacgtggaacagt

SEQ ID NO: 699 - RNA, 19 nt, synthetic construct
  source 1..19: mol_type = other RNA
agggccacgtggaacagtg

SEQ ID NO: 700 - RNA, 19 nt, synthetic construct
  source 1..19: mol_type = other RNA
gggccacgtggaacagtgc

SEQ ID NO: 701 - RNA, 19 nt, synthetic construct
  source 1..19: mol_type = other RNA
ggccacgtggaacagtgcg

SEQ ID NO: 702 - RNA, 19 nt, synthetic construct
  source 1..19: mol_type = other RNA
gccacgtggaacagtgcga

SEQ ID NO: 703 - RNA, 19 nt, synthetic construct
  source 1..19: mol_type = other RNA
ccacgtggaacagtgcgag

SEQ ID NO: 704 - RNA, 19 nt, synthetic construct
  source 1..19: mol_type = other RNA
cacgtggaacagtgcgagt

SEQ ID NO: 705 - RNA, 19 nt, synthetic construct
  source 1..19: mol_type = other RNA
acgtggaacagtgcgagtg

SEQ ID NO: 706 - RNA, 19 nt, synthetic construct
  source 1..19: mol_type = other RNA
cgtggaacagtgcgagtgc

SEQ ID NO: 707 - RNA, 19 nt, synthetic construct
  source 1..19: mol_type = other RNA
gtggaacagtgcgagtgct

SEQ ID NO: 708 - RNA, 19 nt, synthetic construct
  source 1..19: mol_type = other RNA
tggaacagtgcgagtgctt

SEQ ID NO: 709 - RNA, 19 nt, synthetic construct
  source 1..19: mol_type = other RNA
ggaacagtgcgagtgcttc

SEQ ID NO: 710 - RNA, 19 nt, synthetic construct
  source 1..19: mol_type = other RNA
gaacagtgcgagtgcttcg

SEQ ID NO: 711 - RNA, 19 nt, synthetic construct
  source 1..19: mol_type = other RNA
aacagtgcgagtgcttcgg

SEQ ID NO: 712 - RNA, 19 nt, synthetic construct
  source 1..19: mol_type = other RNA
acagtgcgagtgcttcggg

SEQ ID NO: 713 - RNA, 19 nt, synthetic construct
  source 1..19: mol_type = other RNA
cagtgcgagtgcttcgggg

SEQ ID NO: 714 - RNA, 19 nt, synthetic construct
  source 1..19: mol_type = other RNA
agtgcgagtgcttcggggg

SEQ ID NO: 715 - RNA, 19 nt, synthetic construct
  source 1..19: mol_type = other RNA
gtgcgagtgcttcgggggc

SEQ ID NO: 716 - RNA, 19 nt, synthetic construct
  source 1..19: mol_type = other RNA
tgcgagtgcttcgggggcc

SEQ ID NO: 717 - RNA, 19 nt, synthetic construct
  source 1..19: mol_type = other RNA
gcgagtgcttcgggggccg

SEQ ID NO: 718 - RNA, 19 nt, synthetic construct
  source 1..19: mol_type = other RNA
cgagtgcttcgggggccgg

SEQ ID NO: 719 - RNA, 19 nt, synthetic construct
  source 1..19: mol_type = other RNA
gagtgcttcgggggccgga

SEQ ID NO: 720 - RNA, 19 nt, synthetic construct
  source 1..19: mol_type = other RNA
agtgcttcgggggccggac

SEQ ID NO: 721 - RNA, 19 nt, synthetic construct
  source 1..19: mol_type = other RNA
gtgcttcgggggccggacc

SEQ ID NO: 722 - RNA, 19 nt, synthetic construct
  source 1..19: mol_type = other RNA
tgcttcgggggccggacct

SEQ ID NO: 723 - RNA, 19 nt, synthetic construct
  source 1..19: mol_type = other RNA
gcttcgggggccggacctg

SEQ ID NO: 724 - RNA, 19 nt, synthetic construct
  source 1..19: mol_type = other RNA
cttcgggggccggacctgg

SEQ ID NO: 725 - RNA, 19 nt, synthetic construct
  source 1..19: mol_type = other RNA
ttcgggggccggacctggt

SEQ ID NO: 726 - RNA, 19 nt, synthetic construct
  source 1..19: mol_type = other RNA
tcgggggccggacctggtg

SEQ ID NO: 727 - RNA, 19 nt, synthetic construct
  source 1..19: mol_type = other RNA
cgggggccggacctggtgc

SEQ ID NO: 728 - RNA, 19 nt, synthetic construct
  source 1..19: mol_type = other RNA
gggggccggacctggtgcg

SEQ ID NO: 729 - RNA, 19 nt, synthetic construct
  source 1..19: mol_type = other RNA
ggggccggacctggtgcga

SEQ ID NO: 730 - RNA, 19 nt, synthetic construct
  source 1..19: mol_type = other RNA
gggccggacctggtgcgaa

SEQ ID NO: 731 - RNA, 19 nt, synthetic construct
  source 1..19: mol_type = other RNA
ggccggacctggtgcgaag

SEQ ID NO: 732 - RNA, 19 nt, synthetic construct
  source 1..19: mol_type = other RNA
gccggacctggtgcgaagg

SEQ ID NO: 733 - RNA, 19 nt, synthetic construct
  source 1..19: mol_type = other RNA
ccggacctggtgcgaaggc

SEQ ID NO: 734 - RNA, 19 nt, synthetic construct
  source 1..19: mol_type = other RNA
cggacctggtgcgaaggca

SEQ ID NO: 735 - RNA, 19 nt, synthetic construct
  source 1..19: mol_type = other RNA
ggacctggtgcgaaggcac

SEQ ID NO: 736 - RNA, 19 nt, synthetic construct
  source 1..19: mol_type = other RNA
gacctggtgcgaaggcacc

SEQ ID NO: 737 - RNA, 19 nt, synthetic construct
  source 1..19: mol_type = other RNA
acctggtgcgaaggcaccc

SEQ ID NO: 738 - RNA, 19 nt, synthetic construct
  source 1..19: mol_type = other RNA
cctggtgcgaaggcacccg

SEQ ID NO: 739 - RNA, 19 nt, synthetic construct
  source 1..19: mol_type = other RNA
ctggtgcgaaggcacccga

SEQ ID NO: 740 - RNA, 19 nt, synthetic construct
  source 1..19: mol_type = other RNA
tggtgcgaaggcacccgac

SEQ ID NO: 741 - RNA, 19 nt, synthetic construct
  source 1..19: mol_type = other RNA
ggtgcgaaggcacccgaca

SEQ ID NO: 742 - RNA, 19 nt, synthetic construct
  source 1..19: mol_type = other RNA
gtgcgaaggcacccgacat

SEQ ID NO: 743 - RNA, 19 nt, synthetic construct
  source 1..19: mol_type = other RNA
tgcgaaggcacccgacata

SEQ ID NO: 744 - RNA, 19 nt, synthetic construct
  source 1..19: mol_type = other RNA
gcgaaggcacccgacatac

SEQ ID NO: 745 - RNA, 19 nt, synthetic construct
  source 1..19: mol_type = other RNA
cgaaggcacccgacataca

SEQ ID NO: 746 - RNA, 19 nt, synthetic construct
  source 1..19: mol_type = other RNA
gaaggcacccgacatacag

SEQ ID NO: 747 - RNA, 19 nt, synthetic construct
  source 1..19: mol_type = other RNA
aaggcacccgacatacagc

SEQ ID NO: 748 - RNA, 19 nt, synthetic construct
  source 1..19: mol_type = other RNA
aggcacccgacatacagct

SEQ ID NO: 749 - RNA, 19 nt, synthetic construct
  source 1..19: mol_type = other RNA
ggcacccgacatacagctt

SEQ ID NO: 750 - RNA, 19 nt, synthetic construct
  source 1..19: mol_type = other RNA
gcacccgacatacagcttg

SEQ ID NO: 751 - RNA, 19 nt, synthetic construct
  source 1..19: mol_type = other RNA
cacccgacatacagcttgt

SEQ ID NO: 752 - RNA, 19 nt, synthetic construct
  source 1..19: mol_type = other RNA
acccgacatacagcttgtc

SEQ ID NO: 753 - RNA, 19 nt, synthetic construct
  source 1..19: mol_type = other RNA
cccgacatacagcttgtct

SEQ ID NO: 754 - RNA, 19 nt, synthetic construct
  source 1..19: mol_type = other RNA
ccgacatacagcttgtctg

SEQ ID NO: 755 - RNA, 19 nt, synthetic construct
  source 1..19: mol_type = other RNA
cgacatacagcttgtctga

SEQ ID NO: 756 - RNA, 19 nt, synthetic construct
  source 1..19: mol_type = other RNA
gacatacagcttgtctgag

SEQ ID NO: 757 - RNA, 19 nt, synthetic construct
  source 1..19: mol_type = other RNA
acatacagcttgtctgagc

SEQ ID NO: 758 - RNA, 19 nt, synthetic construct
  source 1..19: mol_type = other RNA
catacagcttgtctgagca

SEQ ID NO: 759 - RNA, 19 nt, synthetic construct
  source 1..19: mol_type = other RNA
atacagcttgtctgagcag

SEQ ID NO: 760 - RNA, 19 nt, synthetic construct
  source 1..19: mol_type = other RNA
tacagcttgtctgagcagc

SEQ ID NO: 761 - RNA, 19 nt, synthetic construct
  source 1..19: mol_type = other RNA
acagcttgtctgagcagcc

SEQ ID NO: 762 - RNA, 19 nt, synthetic construct
  source 1..19: mol_type = other RNA
cagcttgtctgagcagccc

SEQ ID NO: 763 - RNA, 19 nt, synthetic construct
  source 1..19: mol_type = other RNA
agcttgtctgagcagccct

SEQ ID NO: 764 - RNA, 19 nt, synthetic construct
  source 1..19: mol_type = other RNA
gcttgtctgagcagccctt

SEQ ID NO: 765 - RNA, 19 nt, synthetic construct
  source 1..19: mol_type = other RNA
cttgtctgagcagcccttg

SEQ ID NO: 766 - RNA, 19 nt, synthetic construct
  source 1..19: mol_type = other RNA
ttgtctgagcagcccttgc

SEQ ID NO: 767 - RNA, 19 nt, synthetic construct
  source 1..19: mol_type = other RNA
tgtctgagcagcccttgcc

SEQ ID NO: 768 - RNA, 19 nt, synthetic construct
  source 1..19: mol_type = other RNA
gtctgagcagcccttgcct

SEQ ID NO: 769 - RNA, 19 nt, synthetic construct
  source 1..19: mol_type = other RNA
tctgagcagcccttgcctg

SEQ ID NO: 770 - RNA, 19 nt, synthetic construct
  source 1..19: mol_type = other RNA
ctgagcagcccttgcctga

SEQ ID NO: 771 - RNA, 19 nt, synthetic construct
  source 1..19: mol_type = other RNA
tgagcagcccttgcctgaa

SEQ ID NO: 772 - RNA, 19 nt, synthetic construct
  source 1..19: mol_type = other RNA
gagcagcccttgcctgaac

SEQ ID NO: 773 - RNA, 19 nt, synthetic construct
  source 1..19: mol_type = other RNA
agcagcccttgcctgaacg

SEQ ID NO: 774 - RNA, 19 nt, synthetic construct
  source 1..19: mol_type = other RNA
gcagcccttgcctgaacgg

SEQ ID NO: 775 - RNA, 19 nt, synthetic construct
  source 1..19: mol_type = other RNA
cagcccttgcctgaacggg

SEQ ID NO: 776 - RNA, 19 nt, synthetic construct
  source 1..19: mol_type = other RNA
agcccttgcctgaacgggg

SEQ ID NO: 777 - RNA, 19 nt, synthetic construct
  source 1..19: mol_type = other RNA
gcccttgcctgaacggggg

SEQ ID NO: 778 - RNA, 19 nt, synthetic construct
  source 1..19: mol_type = other RNA
cccttgcctgaacgggggc

SEQ ID NO: 779 - RNA, 19 nt, synthetic construct
  source 1..19: mol_type = other RNA
ccttgcctgaacgggggca

SEQ ID NO: 780 - RNA, 19 nt, synthetic construct
  source 1..19: mol_type = other RNA
cttgcctgaacgggggcac

SEQ ID NO: 781 - RNA, 19 nt, synthetic construct
  source 1..19: mol_type = other RNA
ttgcctgaacgggggcacc

SEQ ID NO: 782 - RNA, 19 nt, synthetic construct
  source 1..19: mol_type = other RNA
tgcctgaacgggggcacct

SEQ ID NO: 783 - RNA, 19 nt, synthetic construct
  source 1..19: mol_type = other RNA
gcctgaacgggggcacctg

SEQ ID NO: 784 - RNA, 19 nt, synthetic construct
  source 1..19: mol_type = other RNA
cctgaacgggggcacctgc

SEQ ID NO: 785 - RNA, 19 nt, synthetic construct
  source 1..19: mol_type = other RNA
ctgaacgggggcacctgcc

SEQ ID NO: 786 - RNA, 19 nt, synthetic construct
  source 1..19: mol_type = other RNA
tgaacgggggcacctgcca

SEQ ID NO: 787 - RNA, 19 nt, synthetic construct
  source 1..19: mol_type = other RNA
gaacgggggcacctgccac

SEQ ID NO: 788 - RNA, 19 nt, synthetic construct
  source 1..19: mol_type = other RNA
aacgggggcacctgccacc

SEQ ID NO: 789 - RNA, 19 nt, synthetic construct
  source 1..19: mol_type = other RNA
acgggggcacctgccacct

SEQ ID NO: 790 - RNA, 19 nt, synthetic construct
  source 1..19: mol_type = other RNA
cgggggcacctgccacctg

SEQ ID NO: 791 - RNA, 19 nt, synthetic construct
  source 1..19: mol_type = other RNA
gggggcacctgccacctga

SEQ ID NO: 792 - RNA, 19 nt, synthetic construct
  source 1..19: mol_type = other RNA
ggggcacctgccacctgat

SEQ ID NO: 793 - RNA, 19 nt, synthetic construct
  source 1..19: mol_type = other RNA
gggcacctgccacctgatc

SEQ ID NO: 794 - RNA, 19 nt, synthetic construct
  source 1..19: mol_type = other RNA
ggcacctgccacctgatcg

SEQ ID NO: 795 - RNA, 19 nt, synthetic construct
  source 1..19: mol_type = other RNA
gcacctgccacctgatcgt

SEQ ID NO: 796 - RNA, 19 nt, synthetic construct
  source 1..19: mol_type = other RNA
cacctgccacctgatcgtg

SEQ ID NO: 797 - RNA, 19 nt, synthetic construct
  source 1..19: mol_type = other RNA
acctgccacctgatcgtgg

SEQ ID NO: 798 - RNA, 19 nt, synthetic construct
  source 1..19: mol_type = other RNA
cctgccacctgatcgtggc

SEQ ID NO: 799 - RNA, 19 nt, synthetic construct
  source 1..19: mol_type = other RNA
ctgccacctgatcgtggcc

SEQ ID NO: 800 - RNA, 19 nt, synthetic construct
  source 1..19: mol_type = other RNA
tgccacctgatcgtggcca

SEQ ID NO: 801 - RNA, 19 nt, synthetic construct
  source 1..19: mol_type = other RNA
gccacctgatcgtggccac

SEQ ID NO: 802 - RNA, 19 nt, synthetic construct
  source 1..19: mol_type = other RNA
ccacctgatcgtggccacc

SEQ ID NO: 803 - RNA, 19 nt, synthetic construct
  source 1..19: mol_type = other RNA
cacctgatcgtggccaccg

SEQ ID NO: 804 - RNA, 19 nt, synthetic construct
  source 1..19: mol_type = other RNA
acctgatcgtggccaccgg

SEQ ID NO: 805 - RNA, 19 nt, synthetic construct
  source 1..19: mol_type = other RNA
cctgatcgtggccaccggg

SEQ ID NO: 806 - RNA, 19 nt, synthetic construct
  source 1..19: mol_type = other RNA
ctgatcgtggccaccggga

SEQ ID NO: 807 - RNA, 19 nt, synthetic construct
  source 1..19: mol_type = other RNA
tgatcgtggccaccgggac

SEQ ID NO: 808 - RNA, 19 nt, synthetic construct
  source 1..19: mol_type = other RNA
gatcgtggccaccgggacc

SEQ ID NO: 809 - RNA, 19 nt, synthetic construct
  source 1..19: mol_type = other RNA
atcgtggccaccgggacca

SEQ ID NO: 810 - RNA, 19 nt, synthetic construct
  source 1..19: mol_type = other RNA
tcgtggccaccgggaccac

SEQ ID NO: 811 - RNA, 19 nt, synthetic construct
  source 1..19: mol_type = other RNA
cgtggccaccgggaccacc

SEQ ID NO: 812 - RNA, 19 nt, synthetic construct
  source 1..19: mol_type = other RNA
gtggccaccgggaccaccg

SEQ ID NO: 813 - RNA, 19 nt, synthetic construct
  source 1..19: mol_type = other RNA
tggccaccgggaccaccgt

SEQ ID NO: 814 - RNA, 19 nt, synthetic construct
  source 1..19: mol_type = other RNA
ggccaccgggaccaccgtg

SEQ ID NO: 815 - RNA, 19 nt, synthetic construct
  source 1..19: mol_type = other RNA
gccaccgggaccaccgtgt

SEQ ID NO: 816 - RNA, 19 nt, synthetic construct
  source 1..19: mol_type = other RNA
ccaccgggaccaccgtgtg

SEQ ID NO: 817 - RNA, 19 nt, synthetic construct
  source 1..19: mol_type = other RNA
caccgggaccaccgtgtgt

SEQ ID NO: 818 - RNA, 19 nt, synthetic construct
  source 1..19: mol_type = other RNA
accgggaccaccgtgtgtg

SEQ ID NO: 819 - RNA, 19 nt, synthetic construct
  source 1..19: mol_type = other RNA
ccgggaccaccgtgtgtgc

SEQ ID NO: 820 - RNA, 19 nt, synthetic construct
  source 1..19: mol_type = other RNA
cgggaccaccgtgtgtgcc

SEQ ID NO: 821 - RNA, 19 nt, synthetic construct
  source 1..19: mol_type = other RNA
gggaccaccgtgtgtgcct

SEQ ID NO: 822 - RNA, 19 nt, synthetic construct
  source 1..19: mol_type = other RNA
ggaccaccgtgtgtgcctg

SEQ ID NO: 823 - RNA, 19 nt, synthetic construct
  source 1..19: mol_type = other RNA
gaccaccgtgtgtgcctgc

SEQ ID NO: 824 - RNA, 19 nt, synthetic construct
  source 1..19: mol_type = other RNA
accaccgtgtgtgcctgcc

SEQ ID NO: 825 - RNA, 19 nt, synthetic construct
  source 1..19: mol_type = other RNA
ccaccgtgtgtgcctgccc

SEQ ID NO: 826 - RNA, 19 nt, synthetic construct
  source 1..19: mol_type = other RNA
caccgtgtgtgcctgccca

SEQ ID NO: 827 - RNA, 19 nt, synthetic construct
  source 1..19: mol_type = other RNA
accgtgtgtgcctgcccac

SEQ ID NO: 828 - RNA, 19 nt, synthetic construct
  source 1..19: mol_type = other RNA
ccgtgtgtgcctgcccacc

SEQ ID NO: 829 - RNA, 19 nt, synthetic construct
  source 1..19: mol_type = other RNA
cgtgtgtgcctgcccacca

SEQ ID NO: 830 - RNA, 19 nt, synthetic construct
  source 1..19: mol_type = other RNA
gtgtgtgcctgcccaccag

SEQ ID NO: 831 - RNA, 19 nt, synthetic construct
  source 1..19: mol_type = other RNA
tgtgtgcctgcccaccagg

SEQ ID NO: 832 - RNA, 19 nt, synthetic construct
  source 1..19: mol_type = other RNA
gtgtgcctgcccaccaggc

SEQ ID NO: 833 - RNA, 19 nt, synthetic construct
  source 1..19: mol_type = other RNA
tgtgcctgcccaccaggct

SEQ ID NO: 834 - RNA, 19 nt, synthetic construct
  source 1..19: mol_type = other RNA
gtgcctgcccaccaggctt

SEQ ID NO: 835 - RNA, 19 nt, synthetic construct
  source 1..19: mol_type = other RNA
tgcctgcccaccaggcttc

SEQ ID NO: 836 - RNA, 19 nt, synthetic construct
  source 1..19: mol_type = other RNA
gcctgcccaccaggcttcg

SEQ ID NO: 837 - RNA, 19 nt, synthetic construct
  source 1..19: mol_type = other RNA
cctgcccaccaggcttcgc

SEQ ID NO: 838 - RNA, 19 nt, synthetic construct
  source 1..19: mol_type = other RNA
ctgcccaccaggcttcgct

SEQ ID NO: 839 - RNA, 19 nt, synthetic construct
  source 1..19: mol_type = other RNA
tgcccaccaggcttcgctg

SEQ ID NO: 840 - RNA, 19 nt, synthetic construct
  source 1..19: mol_type = other RNA
gcccaccaggcttcgctgg

SEQ ID NO: 841 - RNA, 19 nt, synthetic construct
  source 1..19: mol_type = other RNA
cccaccaggcttcgctgga

SEQ ID NO: 842 - RNA, 19 nt, synthetic construct
  source 1..19: mol_type = other RNA
ccaccaggcttcgctggac

SEQ ID NO: 843 - RNA, 19 nt, synthetic construct
  source 1..19: mol_type = other RNA
caccaggcttcgctggacg

SEQ ID NO: 844 - RNA, 19 nt, synthetic construct
  source 1..19: mol_type = other RNA
accaggcttcgctggacgg

SEQ ID NO: 845 - RNA, 19 nt, synthetic construct
  source 1..19: mol_type = other RNA
ccaggcttcgctggacggc

SEQ ID NO: 846 - RNA, 19 nt, synthetic construct
  source 1..19: mol_type = other RNA
caggcttcgctggacggct

SEQ ID NO: 847 - RNA, 19 nt, synthetic construct
  source 1..19: mol_type = other RNA
aggcttcgctggacggctc

SEQ ID NO: 848 - RNA, 19 nt, synthetic construct
  source 1..19: mol_type = other RNA
ggcttcgctggacggctct

SEQ ID NO: 849 - RNA, 19 nt, synthetic construct
  source 1..19: mol_type = other RNA
gcttcgctggacggctctg

SEQ ID NO: 850 - RNA, 19 nt, synthetic construct
  source 1..19: mol_type = other RNA
cttcgctggacggctctgc

SEQ ID NO: 851 - RNA, 19 nt, synthetic construct
  source 1..19: mol_type = other RNA
ttcgctggacggctctgca

SEQ ID NO: 852 - RNA, 19 nt, synthetic construct
  source 1..19: mol_type = other RNA
tcgctggacggctctgcaa

SEQ ID NO: 853 - RNA, 19 nt, synthetic construct
  source 1..19: mol_type = other RNA
cgctggacggctctgcaac

SEQ ID NO: 854 - RNA, 19 nt, synthetic construct
  source 1..19: mol_type = other RNA
gctggacggctctgcaaca

SEQ ID NO: 855 - RNA, 19 nt, synthetic construct
  source 1..19: mol_type = other RNA
ctggacggctctgcaacat

SEQ ID NO: 856 - RNA, 19 nt, synthetic construct
  source 1..19: mol_type = other RNA
tggacggctctgcaacatc

SEQ ID NO: 857 - RNA, 19 nt, synthetic construct
  source 1..19: mol_type = other RNA
ggacggctctgcaacatcg

SEQ ID NO: 858 - RNA, 19 nt, synthetic construct
  source 1..19: mol_type = other RNA
gacggctctgcaacatcga

SEQ ID NO: 859 - RNA, 19 nt, synthetic construct
  source 1..19: mol_type = other RNA
acggctctgcaacatcgag

SEQ ID NO: 860 - RNA, 19 nt, synthetic construct
  source 1..19: mol_type = other RNA
cggctctgcaacatcgagc

SEQ ID NO: 861 - RNA, 19 nt, synthetic construct
  source 1..19: mol_type = other RNA
ggctctgcaacatcgagcc

SEQ ID NO: 862 - RNA, 19 nt, synthetic construct
  source 1..19: mol_type = other RNA
gctctgcaacatcgagcct

SEQ ID NO: 863 - RNA, 19 nt, synthetic construct
  source 1..19: mol_type = other RNA
ctctgcaacatcgagcctg

SEQ ID NO: 864 - RNA, 19 nt, synthetic construct
  source 1..19: mol_type = other RNA
tctgcaacatcgagcctga

SEQ ID NO: 865 - RNA, 19 nt, synthetic construct
  source 1..19: mol_type = other RNA
ctgcaacatcgagcctgat

SEQ ID NO: 866 - RNA, 19 nt, synthetic construct
  source 1..19: mol_type = other RNA
tgcaacatcgagcctgatg

SEQ ID NO: 867 - RNA, 19 nt, synthetic construct
  source 1..19: mol_type = other RNA
gcaacatcgagcctgatga

SEQ ID NO: 868 - RNA, 19 nt, synthetic construct
  source 1..19: mol_type = other RNA
caacatcgagcctgatgag

SEQ ID NO: 869 - RNA, 19 nt, synthetic construct
  source 1..19: mol_type = other RNA
aacatcgagcctgatgagc

SEQ ID NO: 870 - RNA, 19 nt, synthetic construct
  source 1..19: mol_type = other RNA
acatcgagcctgatgagcg

SEQ ID NO: 871 - RNA, 19 nt, synthetic construct
  source 1..19: mol_type = other RNA
catcgagcctgatgagcgc

SEQ ID NO: 872 - RNA, 19 nt, synthetic construct
  source 1..19: mol_type = other RNA
atcgagcctgatgagcgct

SEQ ID NO: 873 - RNA, 19 nt, synthetic construct
  source 1..19: mol_type = other RNA
tcgagcctgatgagcgctg

SEQ ID NO: 874 - RNA, 19 nt, synthetic construct
  source 1..19: mol_type = other RNA
cgagcctgatgagcgctgc

SEQ ID NO: 875 - RNA, 19 nt, synthetic construct
  source 1..19: mol_type = other RNA
gagcctgatgagcgctgct

SEQ ID NO: 876 - RNA, 19 nt, synthetic construct
  source 1..19: mol_type = other RNA
agcctgatgagcgctgctt

SEQ ID NO: 877 - RNA, 19 nt, synthetic construct
  source 1..19: mol_type = other RNA
gcctgatgagcgctgcttc

SEQ ID NO: 878 - RNA, 19 nt, synthetic construct
  source 1..19: mol_type = other RNA
cctgatgagcgctgcttct

SEQ ID NO: 879 - RNA, 19 nt, synthetic construct
  source 1..19: mol_type = other RNA
ctgatgagcgctgcttctt

SEQ ID NO: 880 - RNA, 19 nt, synthetic construct
  source 1..19: mol_type = other RNA
tgatgagcgctgcttcttg

SEQ ID NO: 881 - RNA, 19 nt, synthetic construct
  source 1..19: mol_type = other RNA
gatgagcgctgcttcttgg

SEQ ID NO: 882 - RNA, 19 nt, synthetic construct
  source 1..19: mol_type = other RNA
atgagcgctgcttcttggg

SEQ ID NO: 883 - RNA, 19 nt, synthetic construct
  source 1..19: mol_type = other RNA
tgagcgctgcttcttgggg

SEQ ID NO: 884 - RNA, 19 nt, synthetic construct
  source 1..19: mol_type = other RNA
gagcgctgcttcttgggga

SEQ ID NO: 885 - RNA, 19 nt, synthetic construct
  source 1..19: mol_type = other RNA
agcgctgcttcttggggaa

SEQ ID NO: 886 - RNA, 19 nt, synthetic construct
  source 1..19: mol_type = other RNA
gcgctgcttcttggggaac

SEQ ID NO: 887 - RNA, 19 nt, synthetic construct
  source 1..19: mol_type = other RNA
cgctgcttcttggggaacg

SEQ ID NO: 888 - RNA, 19 nt, synthetic construct
  source 1..19: mol_type = other RNA
gctgcttcttggggaacgg

SEQ ID NO: 889 - RNA, 19 nt, synthetic construct
  source 1..19: mol_type = other RNA
ctgcttcttggggaacggc

SEQ ID NO: 890 - RNA, 19 nt, synthetic construct
  source 1..19: mol_type = other RNA
tgcttcttggggaacggca

SEQ ID NO: 891 - RNA, 19 nt, synthetic construct
  source 1..19: mol_type = other RNA
gcttcttggggaacggcac

SEQ ID NO: 892 - RNA, 19 nt, synthetic construct
  source 1..19: mol_type = other RNA
cttcttggggaacggcact

SEQ ID NO: 893 - RNA, 19 nt, synthetic construct
  source 1..19: mol_type = other RNA
ttcttggggaacggcactg

SEQ ID NO: 894 - RNA, 19 nt, synthetic construct
  source 1..19: mol_type = other RNA
tcttggggaacggcactgg

SEQ ID NO: 895 - RNA, 19 nt, synthetic construct
  source 1..19: mol_type = other RNA
cttggggaacggcactggg

SEQ ID NO: 896 - RNA, 19 nt, synthetic construct
  source 1..19: mol_type = other RNA
ttggggaacggcactgggt

SEQ ID NO: 897 - RNA, 19 nt, synthetic construct
  source 1..19: mol_type = other RNA
tggggaacggcactgggta

SEQ ID NO: 898 - RNA, 19 nt, synthetic construct
  source 1..19: mol_type = other RNA
ggggaacggcactgggtac

SEQ ID NO: 899 - RNA, 19 nt, synthetic construct
  source 1..19: mol_type = other RNA
gggaacggcactgggtacc

SEQ ID NO: 900 - RNA, 19 nt, synthetic construct
  source 1..19: mol_type = other RNA
ggaacggcactgggtaccg

SEQ ID NO: 901 - RNA, 19 nt, synthetic construct
  source 1..19: mol_type = other RNA
gaacggcactgggtaccgt

SEQ ID NO: 902 - RNA, 19 nt, synthetic construct
  source 1..19: mol_type = other RNA
aacggcactgggtaccgtg

SEQ ID NO: 903 - RNA, 19 nt, synthetic construct
  source 1..19: mol_type = other RNA
acggcactgggtaccgtgg

SEQ ID NO: 904 - RNA, 19 nt, synthetic construct
  source 1..19: mol_type = other RNA
cggcactgggtaccgtggc

SEQ ID NO: 905 - RNA, 19 nt, synthetic construct
  source 1..19: mol_type = other RNA
ggcactgggtaccgtggcg

SEQ ID NO: 906 - RNA, 19 nt, synthetic construct
  source 1..19: mol_type = other RNA
gcactgggtaccgtggcgt

SEQ ID NO: 907 - RNA, 19 nt, synthetic construct
  source 1..19: mol_type = other RNA
cactgggtaccgtggcgtg

SEQ ID NO: 908 - RNA, 19 nt, synthetic construct
  source 1..19: mol_type = other RNA
actgggtaccgtggcgtgg

SEQ ID NO: 909 - RNA, 19 nt, synthetic construct
  source 1..19: mol_type = other RNA
ctgggtaccgtggcgtggc

SEQ ID NO: 910 - RNA, 19 nt, synthetic construct
  source 1..19: mol_type = other RNA
tgggtaccgtggcgtggcc

SEQ ID NO: 911 - RNA, 19 nt, synthetic construct
  source 1..19: mol_type = other RNA
gggtaccgtggcgtggcca

SEQ ID NO: 912 - RNA, 19 nt, synthetic construct
  source 1..19: mol_type = other RNA
ggtaccgtggcgtggccag

SEQ ID NO: 913 - RNA, 19 nt, synthetic construct
  source 1..19: mol_type = other RNA
gtaccgtggcgtggccagc

SEQ ID NO: 914 - RNA, 19 nt, synthetic construct
  source 1..19: mol_type = other RNA
taccgtggcgtggccagca

SEQ ID NO: 915 - RNA, 19 nt, synthetic construct
  source 1..19: mol_type = other RNA
accgtggcgtggccagcac

SEQ ID NO: 916 - RNA, 19 nt, synthetic construct
  source 1..19: mol_type = other RNA
ccgtggcgtggccagcacc

SEQ ID NO: 917 - RNA, 19 nt, synthetic construct
  source 1..19: mol_type = other RNA
cgtggcgtggccagcacct

SEQ ID NO: 918 - RNA, 19 nt, synthetic construct
  source 1..19: mol_type = other RNA
gtggcgtggccagcacctc

SEQ ID NO: 919 - RNA, 19 nt, synthetic construct
  source 1..19: mol_type = other RNA
tggcgtggccagcacctca

SEQ ID NO: 920 - RNA, 19 nt, synthetic construct
  source 1..19: mol_type = other RNA
ggcgtggccagcacctcag

SEQ ID NO: 921 - RNA, 19 nt, synthetic construct
  source 1..19: mol_type = other RNA
gcgtggccagcacctcagc

SEQ ID NO: 922 - RNA, 19 nt, synthetic construct
  source 1..19: mol_type = other RNA
cgtggccagcacctcagcc

SEQ ID NO: 923 - RNA, 19 nt, synthetic construct
  source 1..19: mol_type = other RNA
gtggccagcacctcagcct

SEQ ID NO: 924 - RNA, 19 nt, synthetic construct
  source 1..19: mol_type = other RNA
tggccagcacctcagcctc

SEQ ID NO: 925 - RNA, 19 nt, synthetic construct
  source 1..19: mol_type = other RNA
ggccagcacctcagcctcg

SEQ ID NO: 926 - RNA, 19 nt, synthetic construct
  source 1..19: mol_type = other RNA
gccagcacctcagcctcgg

SEQ ID NO: 927 - RNA, 19 nt, synthetic construct
  source 1..19: mol_type = other RNA
ccagcacctcagcctcggg

SEQ ID NO: 928 - RNA, 19 nt, synthetic construct
  source 1..19: mol_type = other RNA
cagcacctcagcctcgggc

SEQ ID NO: 929 - RNA, 19 nt, synthetic construct
  source 1..19: mol_type = other RNA
agcacctcagcctcgggcc

SEQ ID NO: 930 - RNA, 19 nt, synthetic construct
  source 1..19: mol_type = other RNA
gcacctcagcctcgggcct

SEQ ID NO: 931 - RNA, 19 nt, synthetic construct
  source 1..19: mol_type = other RNA
cacctcagcctcgggcctc

SEQ ID NO: 932 - RNA, 19 nt, synthetic construct
  source 1..19: mol_type = other RNA
acctcagcctcgggcctca

SEQ ID NO: 933 - RNA, 19 nt, synthetic construct
  source 1..19: mol_type = other RNA
cctcagcctcgggcctcag

SEQ ID NO: 934 - RNA, 19 nt, synthetic construct
  source 1..19: mol_type = other RNA
ctcagcctcgggcctcagc

SEQ ID NO: 935 - RNA, 19 nt, synthetic construct
  source 1..19: mol_type = other RNA
tcagcctcgggcctcagct

SEQ ID NO: 936 - RNA, 19 nt, synthetic construct
  source 1..19: mol_type = other RNA
cagcctcgggcctcagctg

SEQ ID NO: 937 - RNA, 19 nt, synthetic construct
  source 1..19: mol_type = other RNA
agcctcgggcctcagctgc

SEQ ID NO: 938 - RNA, 19 nt, synthetic construct
  source 1..19: mol_type = other RNA
gcctcgggcctcagctgcc

SEQ ID NO: 939 - RNA, 19 nt, synthetic construct
  source 1..19: mol_type = other RNA
cctcgggcctcagctgcct

SEQ ID NO: 940 - RNA, 19 nt, synthetic construct
  source 1..19: mol_type = other RNA
ctcgggcctcagctgcctg

SEQ ID NO: 941 - RNA, 19 nt, synthetic construct
  source 1..19: mol_type = other RNA
tcgggcctcagctgcctgg

SEQ ID NO: 942 - RNA, 19 nt, synthetic construct
  source 1..19: mol_type = other RNA
cgggcctcagctgcctggc

SEQ ID NO: 943 - RNA, 19 nt, synthetic construct
  source 1..19: mol_type = other RNA
gggcctcagctgcctggcc

SEQ ID NO: 944 - RNA, 19 nt, synthetic construct
  source 1..19: mol_type = other RNA
ggcctcagctgcctggcct

SEQ ID NO: 945 - RNA, 19 nt, synthetic construct
  source 1..19: mol_type = other RNA
gcctcagctgcctggcctg

SEQ ID NO: 946 - RNA, 19 nt, synthetic construct
  source 1..19: mol_type = other RNA
cctcagctgcctggcctgg

SEQ ID NO: 947 - RNA, 19 nt, synthetic construct
  source 1..19: mol_type = other RNA
ctcagctgcctggcctgga

SEQ ID NO: 948 - RNA, 19 nt, synthetic construct
  source 1..19: mol_type = other RNA
tcagctgcctggcctggaa

SEQ ID NO: 949 - RNA, 19 nt, synthetic construct
  source 1..19: mol_type = other RNA
cagctgcctggcctggaac

SEQ ID NO: 950 - RNA, 19 nt, synthetic construct
  source 1..19: mol_type = other RNA
agctgcctggcctggaact

SEQ ID NO: 951 - RNA, 19 nt, synthetic construct
  source 1..19: mol_type = other RNA
gctgcctggcctggaactc

SEQ ID NO: 952 - RNA, 19 nt, synthetic construct
  source 1..19: mol_type = other RNA
ctgcctggcctggaactcc

SEQ ID NO: 953 - RNA, 19 nt, synthetic construct
  source 1..19: mol_type = other RNA
tgcctggcctggaactccg

SEQ ID NO: 954 - RNA, 19 nt, synthetic construct
  source 1..19: mol_type = other RNA
gcctggcctggaactccga

SEQ ID NO: 955 - RNA, 19 nt, synthetic construct
  source 1..19: mol_type = other RNA
cctggcctggaactccgat

SEQ ID NO: 956 - RNA, 19 nt, synthetic construct
  source 1..19: mol_type = other RNA
ctggcctggaactccgatc

SEQ ID NO: 957 - RNA, 19 nt, synthetic construct
  source 1..19: mol_type = other RNA
tggcctggaactccgatct

SEQ ID NO: 958 - RNA, 19 nt, synthetic construct
  source 1..19: mol_type = other RNA
ggcctggaactccgatctg

SEQ ID NO: 959 - RNA, 19 nt, synthetic construct
  source 1..19: mol_type = other RNA
gcctggaactccgatctgc

SEQ ID NO: 960 - RNA, 19 nt, synthetic construct
  source 1..19: mol_type = other RNA
cctggaactccgatctgct

SEQ ID NO: 961 - RNA, 19 nt, synthetic construct
  source 1..19: mol_type = other RNA
ctggaactccgatctgctc

SEQ ID NO: 962 - RNA, 19 nt, synthetic construct
  source 1..19: mol_type = other RNA
tggaactccgatctgctct

SEQ ID NO: 963 - RNA, 19 nt, synthetic construct
  source 1..19: mol_type = other RNA
ggaactccgatctgctcta

SEQ ID NO: 964 - RNA, 19 nt, synthetic construct
  source 1..19: mol_type = other RNA
gaactccgatctgctctac

SEQ ID NO: 965 - RNA, 19 nt, synthetic construct
  source 1..19: mol_type = other RNA
aactccgatctgctctacc

SEQ ID NO: 966 - RNA, 19 nt, synthetic construct
  source 1..19: mol_type = other RNA
actccgatctgctctacca

SEQ ID NO: 967 - RNA, 19 nt, synthetic construct
  source 1..19: mol_type = other RNA
ctccgatctgctctaccag

SEQ ID NO: 968 - RNA, 19 nt, synthetic construct
  source 1..19: mol_type = other RNA
tccgatctgctctaccagg

SEQ ID NO: 969 - RNA, 19 nt, synthetic construct
  source 1..19: mol_type = other RNA
ccgatctgctctaccagga

SEQ ID NO: 970 - RNA, 19 nt, synthetic construct
  source 1..19: mol_type = other RNA
cgatctgctctaccaggag

SEQ ID NO: 971 - RNA, 19 nt, synthetic construct
  source 1..19: mol_type = other RNA
gatctgctctaccaggagc

SEQ ID NO: 972 - RNA, 19 nt, synthetic construct
  source 1..19: mol_type = other RNA
atctgctctaccaggagct

SEQ ID NO: 973 - RNA, 19 nt, synthetic construct
  source 1..19: mol_type = other RNA
tctgctctaccaggagctg

SEQ ID NO: 974 - RNA, 19 nt, synthetic construct
  source 1..19: mol_type = other RNA
ctgctctaccaggagctgc

SEQ ID NO: 975 - RNA, 19 nt, synthetic construct
  source 1..19: mol_type = other RNA
tgctctaccaggagctgca

SEQ ID NO: 976 - RNA, 19 nt, synthetic construct
  source 1..19: mol_type = other RNA
gctctaccaggagctgcac

SEQ ID NO: 977 - RNA, 19 nt, synthetic construct
  source 1..19: mol_type = other RNA
ctctaccaggagctgcacg

SEQ ID NO: 978 - RNA, 19 nt, synthetic construct
  source 1..19: mol_type = other RNA
tctaccaggagctgcacgt

SEQ ID NO: 979 - RNA, 19 nt, synthetic construct
  source 1..19: mol_type = other RNA
ctaccaggagctgcacgtg

SEQ ID NO: 980 - RNA, 19 nt, synthetic construct
  source 1..19: mol_type = other RNA
taccaggagctgcacgtgg

SEQ ID NO: 981 - RNA, 19 nt, synthetic construct
  source 1..19: mol_type = other RNA
accaggagctgcacgtgga

SEQ ID NO: 982 - RNA, 19 nt, synthetic construct
  source 1..19: mol_type = other RNA
ccaggagctgcacgtggac

SEQ ID NO: 983 - RNA, 19 nt, synthetic construct
  source 1..19: mol_type = other RNA
caggagctgcacgtggact

SEQ ID NO: 984 - RNA, 19 nt, synthetic construct
  source 1..19: mol_type = other RNA
aggagctgcacgtggactc

SEQ ID NO: 985 - RNA, 19 nt, synthetic construct
  source 1..19: mol_type = other RNA
ggagctgcacgtggactcc

SEQ ID NO: 986 - RNA, 19 nt, synthetic construct
  source 1..19: mol_type = other RNA
gagctgcacgtggactccg

SEQ ID NO: 987 - RNA, 19 nt, synthetic construct
  source 1..19: mol_type = other RNA
agctgcacgtggactccgt

SEQ ID NO: 988 - RNA, 19 nt, synthetic construct
  source 1..19: mol_type = other RNA
gctgcacgtggactccgtg

SEQ ID NO: 989 - RNA, 19 nt, synthetic construct
  source 1..19: mol_type = other RNA
ctgcacgtggactccgtgg

SEQ ID NO: 990 - RNA, 19 nt, synthetic construct
  source 1..19: mol_type = other RNA
tgcacgtggactccgtggg

SEQ ID NO: 991 - RNA, 19 nt, synthetic construct
  source 1..19: mol_type = other RNA
gcacgtggactccgtgggc

SEQ ID NO: 992 - RNA, 19 nt, synthetic construct
  source 1..19: mol_type = other RNA
cacgtggactccgtgggcg

SEQ ID NO: 993 - RNA, 19 nt, synthetic construct
  source 1..19: mol_type = other RNA
acgtggactccgtgggcgc

SEQ ID NO: 994 - RNA, 19 nt, synthetic construct
  source 1..19: mol_type = other RNA
cgtggactccgtgggcgcc

SEQ ID NO: 995 - RNA, 19 nt, synthetic construct
  source 1..19: mol_type = other RNA
gtggactccgtgggcgccg

SEQ ID NO: 996 - RNA, 19 nt, synthetic construct
  source 1..19: mol_type = other RNA
tggactccgtgggcgccgc

SEQ ID NO: 997 - RNA, 19 nt, synthetic construct
  source 1..19: mol_type = other RNA
ggactccgtgggcgccgcg

SEQ ID NO: 998 - RNA, 19 nt, synthetic construct
  source 1..19: mol_type = other RNA
gactccgtgggcgccgcgg

SEQ ID NO: 999 - RNA, 19 nt, synthetic construct
  source 1..19: mol_type = other RNA
actccgtgggcgccgcggc

SEQ ID NO: 1000 - RNA, 19 nt, synthetic construct
  source 1..19: mol_type = other RNA
ctccgtgggcgccgcggcc

SEQ ID NO: 1001 - RNA, 19 nt, synthetic construct
  source 1..19: mol_type = other RNA
tccgtgggcgccgcggccc

SEQ ID NO: 1002 - RNA, 19 nt, synthetic construct
  source 1..19: mol_type = other RNA
ccgtgggcgccgcggccct

SEQ ID NO: 1003 - RNA, 19 nt, synthetic construct
  source 1..19: mol_type = other RNA
cgtgggcgccgcggccctg

SEQ ID NO: 1004 - RNA, 19 nt, synthetic construct
  source 1..19: mol_type = other RNA
gtgggcgccgcggccctgc

SEQ ID NO: 1005 - RNA, 19 nt, synthetic construct
  source 1..19: mol_type = other RNA
tgggcgccgcggccctgct

SEQ ID NO: 1006 - RNA, 19 nt, synthetic construct
  source 1..19: mol_type = other RNA
gggcgccgcggccctgctg

SEQ ID NO: 1007 - RNA, 19 nt, synthetic construct
  source 1..19: mol_type = other RNA
ggcgccgcggccctgctgg

SEQ ID NO: 1008 - RNA, 19 nt, synthetic construct
  source 1..19: mol_type = other RNA
gcgccgcggccctgctggg

SEQ ID NO: 1009 - RNA, 19 nt, synthetic construct
  source 1..19: mol_type = other RNA
cgccgcggccctgctgggc

SEQ ID NO: 1010 - RNA, 19 nt, synthetic construct
  source 1..19: mol_type = other RNA
gccgcggccctgctgggcc

SEQ ID NO: 1011 - RNA, 19 nt, synthetic construct
  source 1..19: mol_type = other RNA
ccgcggccctgctgggcct

SEQ ID NO: 1012 - RNA, 19 nt, synthetic construct
  source 1..19: mol_type = other RNA
cgcggccctgctgggcctg

SEQ ID NO: 1013 - RNA, 19 nt, synthetic construct
  source 1..19: mol_type = other RNA
gcggccctgctgggcctgg

SEQ ID NO: 1014 - RNA, 19 nt, synthetic construct
  source 1..19: mol_type = other RNA
cggccctgctgggcctggg

SEQ ID NO: 1015 - RNA, 19 nt, synthetic construct
  source 1..19: mol_type = other RNA
ggccctgctgggcctgggc

SEQ ID NO: 1016 - RNA, 19 nt, synthetic construct
  source 1..19: mol_type = other RNA
gccctgctgggcctgggcc

SEQ ID NO: 1017 - RNA, 19 nt, synthetic construct
  source 1..19: mol_type = other RNA
ccctgctgggcctgggccc

SEQ ID NO: 1018 - RNA, 19 nt, synthetic construct
  source 1..19: mol_type = other RNA
cctgctgggcctgggcccc

SEQ ID NO: 1019 - RNA, 19 nt, synthetic construct
  source 1..19: mol_type = other RNA
ctgctgggcctgggccccc

SEQ ID NO: 1020 - RNA, 19 nt, synthetic construct
  source 1..19: mol_type = other RNA
tgctgggcctgggccccca

SEQ ID NO: 1021 - RNA, 19 nt, synthetic construct
  source 1..19: mol_type = other RNA
gctgggcctgggcccccat

SEQ ID NO: 1022 - RNA, 19 nt, synthetic construct
  source 1..19: mol_type = other RNA
ctgggcctgggcccccatg

SEQ ID NO: 1023 - RNA, 19 nt, synthetic construct
  source 1..19: mol_type = other RNA
tgggcctgggcccccatgc

SEQ ID NO: 1024 - RNA, 19 nt, synthetic construct
  source 1..19: mol_type = other RNA
gggcctgggcccccatgcc

SEQ ID NO: 1025 - RNA, 19 nt, synthetic construct
  source 1..19: mol_type = other RNA
ggcctgggcccccatgcct

SEQ ID NO: 1026 - RNA, 19 nt, synthetic construct
  source 1..19: mol_type = other RNA
gcctgggcccccatgccta

SEQ ID NO: 1027 - RNA, 19 nt, synthetic construct
  source 1..19: mol_type = other RNA
cctgggcccccatgcctac

SEQ ID NO: 1028 - RNA, 19 nt, synthetic construct
  source 1..19: mol_type = other RNA
ctgggcccccatgcctact

SEQ ID NO: 1029 - RNA, 19 nt, synthetic construct
  source 1..19: mol_type = other RNA
tgggcccccatgcctactg

SEQ ID NO: 1030 - RNA, 19 nt, synthetic construct
  source 1..19: mol_type = other RNA
gggcccccatgcctactgc

SEQ ID NO: 1031 - RNA, 19 nt, synthetic construct
  source 1..19: mol_type = other RNA
ggcccccatgcctactgcc

SEQ ID NO: 1032 - RNA, 19 nt, synthetic construct
  source 1..19: mol_type = other RNA
gcccccatgcctactgccg

SEQ ID NO: 1033 - RNA, 19 nt, synthetic construct
  source 1..19: mol_type = other RNA
cccccatgcctactgccgg

SEQ ID NO: 1034 - RNA, 19 nt, synthetic construct
  source 1..19: mol_type = other RNA
ccccatgcctactgccgga

SEQ ID NO: 1035 - RNA, 19 nt, synthetic construct
  source 1..19: mol_type = other RNA
cccatgcctactgccggaa

SEQ ID NO: 1036 - RNA, 19 nt, synthetic construct
  source 1..19: mol_type = other RNA
ccatgcctactgccggaat

SEQ ID NO: 1037 - RNA, 19 nt, synthetic construct
  source 1..19: mol_type = other RNA
catgcctactgccggaatc

SEQ ID NO: 1038 - RNA, 19 nt, synthetic construct
  source 1..19: mol_type = other RNA
atgcctactgccggaatcc

SEQ ID NO: 1039 - RNA, 19 nt, synthetic construct
  source 1..19: mol_type = other RNA
tgcctactgccggaatccg

SEQ ID NO: 1040 - RNA, 19 nt, synthetic construct
  source 1..19: mol_type = other RNA
gcctactgccggaatccgg

SEQ ID NO: 1041 - RNA, 19 nt, synthetic construct
  source 1..19: mol_type = other RNA
cctactgccggaatccgga

SEQ ID NO: 1042 - RNA, 19 nt, synthetic construct
  source 1..19: mol_type = other RNA
ctactgccggaatccggac

SEQ ID NO: 1043 - RNA, 19 nt, synthetic construct
  source 1..19: mol_type = other RNA
tactgccggaatccggaca

SEQ ID NO: 1044 - RNA, 19 nt, synthetic construct
  source 1..19: mol_type = other RNA
actgccggaatccggacaa

SEQ ID NO: 1045 - RNA, 19 nt, synthetic construct
  source 1..19: mol_type = other RNA
ctgccggaatccggacaat

SEQ ID NO: 1046 - RNA, 19 nt, synthetic construct
  source 1..19: mol_type = other RNA
tgccggaatccggacaatg

SEQ ID NO: 1047 - RNA, 19 nt, synthetic construct
  source 1..19: mol_type = other RNA
gccggaatccggacaatga

SEQ ID NO: 1048 - RNA, 19 nt, synthetic construct
  source 1..19: mol_type = other RNA
ccggaatccggacaatgac

SEQ ID NO: 1049 - RNA, 19 nt, synthetic construct
  source 1..19: mol_type = other RNA
cggaatccggacaatgacg

SEQ ID NO: 1050 - RNA, 19 nt, synthetic construct
  source 1..19: mol_type = other RNA
ggaatccggacaatgacga

SEQ ID NO: 1051 - RNA, 19 nt, synthetic construct
  source 1..19: mol_type = other RNA
gaatccggacaatgacgag

SEQ ID NO: 1052 - RNA, 19 nt, synthetic construct
  source 1..19: mol_type = other RNA
aatccggacaatgacgaga

SEQ ID NO: 1053 - RNA, 19 nt, synthetic construct
  source 1..19: mol_type = other RNA
atccggacaatgacgagag

SEQ ID NO: 1054 - RNA, 19 nt, synthetic construct
  source 1..19: mol_type = other RNA
tccggacaatgacgagagg

SEQ ID NO: 1055 - RNA, 19 nt, synthetic construct
  source 1..19: mol_type = other RNA
ccggacaatgacgagaggc

SEQ ID NO: 1056 - RNA, 19 nt, synthetic construct
  source 1..19: mol_type = other RNA
cggacaatgacgagaggcc

SEQ ID NO: 1057 - RNA, 19 nt, synthetic construct
  source 1..19: mol_type = other RNA
ggacaatgacgagaggccc

SEQ ID NO: 1058 - RNA, 19 nt, synthetic construct
  source 1..19: mol_type = other RNA
gacaatgacgagaggccct

SEQ ID NO: 1059 - RNA, 19 nt, synthetic construct
  source 1..19: mol_type = other RNA
acaatgacgagaggccctg

SEQ ID NO: 1060 - RNA, 19 nt, synthetic construct
  source 1..19: mol_type = other RNA
caatgacgagaggccctgg

SEQ ID NO: 1061 - RNA, 19 nt, synthetic construct
  source 1..19: mol_type = other RNA
aatgacgagaggccctggt

SEQ ID NO: 1062 - RNA, 19 nt, synthetic construct
  source 1..19: mol_type = other RNA
atgacgagaggccctggtg

SEQ ID NO: 1063 - RNA, 19 nt, synthetic construct
  source 1..19: mol_type = other RNA
tgacgagaggccctggtgc

SEQ ID NO: 1064 - RNA, 19 nt, synthetic construct
  source 1..19: mol_type = other RNA
gacgagaggccctggtgct

SEQ ID NO: 1065 - RNA, 19 nt, synthetic construct
  source 1..19: mol_type = other RNA
acgagaggccctggtgcta

SEQ ID NO: 1066 - RNA, 19 nt, synthetic construct
  source 1..19: mol_type = other RNA
cgagaggccctggtgctac

SEQ ID NO: 1067 - RNA, 19 nt, synthetic construct
  source 1..19: mol_type = other RNA
gagaggccctggtgctacg

SEQ ID NO: 1068 - RNA, 19 nt, synthetic construct
  source 1..19: mol_type = other RNA
agaggccctggtgctacgt

SEQ ID NO: 1069 - RNA, 19 nt, synthetic construct
  source 1..19: mol_type = other RNA
gaggccctggtgctacgtg

SEQ ID NO: 1070 - RNA, 19 nt, synthetic construct
  source 1..19: mol_type = other RNA
aggccctggtgctacgtgg

SEQ ID NO: 1071 - RNA, 19 nt, synthetic construct
  source 1..19: mol_type = other RNA
ggccctggtgctacgtggt

SEQ ID NO: 1072 - RNA, 19 nt, synthetic construct
  source 1..19: mol_type = other RNA
gccctggtgctacgtggtg

SEQ ID NO: 1073 - RNA, 19 nt, synthetic construct
  source 1..19: mol_type = other RNA
ccctggtgctacgtggtga

SEQ ID NO: 1074 - RNA, 19 nt, synthetic construct
  source 1..19: mol_type = other RNA
cctggtgctacgtggtgaa

SEQ ID NO: 1075 - RNA, 19 nt, synthetic construct
  source 1..19: mol_type = other RNA
ctggtgctacgtggtgaag

SEQ ID NO: 1076 - RNA, 19 nt, synthetic construct
  source 1..19: mol_type = other RNA
tggtgctacgtggtgaagg

SEQ ID NO: 1077 - RNA, 19 nt, synthetic construct
  source 1..19: mol_type = other RNA
ggtgctacgtggtgaagga

SEQ ID NO: 1078 - RNA, 19 nt, synthetic construct
  source 1..19: mol_type = other RNA
gtgctacgtggtgaaggac

SEQ ID NO: 1079 - RNA, 19 nt, synthetic construct
  source 1..19: mol_type = other RNA
tgctacgtggtgaaggaca

SEQ ID NO: 1080 - RNA, 19 nt, synthetic construct
  source 1..19: mol_type = other RNA
gctacgtggtgaaggacag

SEQ ID NO: 1081 - RNA, 19 nt, synthetic construct
  source 1..19: mol_type = other RNA
ctacgtggtgaaggacagc

SEQ ID NO: 1082 - RNA, 19 nt, synthetic construct
  source 1..19: mol_type = other RNA
tacgtggtgaaggacagcg

SEQ ID NO: 1083 - RNA, 19 nt, synthetic construct
  source 1..19: mol_type = other RNA
acgtggtgaaggacagcgc

SEQ ID NO: 1084 - RNA, 19 nt, synthetic construct
  source 1..19: mol_type = other RNA
cgtggtgaaggacagcgcg

SEQ ID NO: 1085 - RNA, 19 nt, synthetic construct
  source 1..19: mol_type = other RNA
gtggtgaaggacagcgcgc

SEQ ID NO: 1086 - RNA, 19 nt, synthetic construct
  source 1..19: mol_type = other RNA
tggtgaaggacagcgcgct

SEQ ID NO: 1087 - RNA, 19 nt, synthetic construct
  source 1..19: mol_type = other RNA
ggtgaaggacagcgcgctc

SEQ ID NO: 1088 - RNA, 19 nt, synthetic construct
  source 1..19: mol_type = other RNA
gtgaaggacagcgcgctct

SEQ ID NO: 1089 - RNA, 19 nt, synthetic construct
  source 1..19: mol_type = other RNA
tgaaggacagcgcgctctc

SEQ ID NO: 1090 - RNA, 19 nt, synthetic construct
  source 1..19: mol_type = other RNA
gaaggacagcgcgctctcc

SEQ ID NO: 1091 - RNA, 19 nt, synthetic construct
  source 1..19: mol_type = other RNA
aaggacagcgcgctctcct

SEQ ID NO: 1092 - RNA, 19 nt, synthetic construct
  source 1..19: mol_type = other RNA
aggacagcgcgctctcctg

SEQ ID NO: 1093 - RNA, 19 nt, synthetic construct
  source 1..19: mol_type = other RNA
ggacagcgcgctctcctgg

SEQ ID NO: 1094 - RNA, 19 nt, synthetic construct
  source 1..19: mol_type = other RNA
gacagcgcgctctcctggg

SEQ ID NO: 1095 - RNA, 19 nt, synthetic construct
  source 1..19: mol_type = other RNA
acagcgcgctctcctggga

SEQ ID NO: 1096 - RNA, 19 nt, synthetic construct
  source 1..19: mol_type = other RNA
cagcgcgctctcctgggag

SEQ ID NO: 1097 - RNA, 19 nt, synthetic construct
  source 1..19: mol_type = other RNA
agcgcgctctcctgggagt

SEQ ID NO: 1098 - RNA, 19 nt, synthetic construct
  source 1..19: mol_type = other RNA
gcgcgctctcctgggagta

SEQ ID NO: 1099 - RNA, 19 nt, synthetic construct
  source 1..19: mol_type = other RNA
cgcgctctcctgggagtac

SEQ ID NO: 1100 - RNA, 19 nt, synthetic construct
  source 1..19: mol_type = other RNA
gcgctctcctgggagtact

SEQ ID NO: 1101 - RNA, 19 nt, synthetic construct
  source 1..19: mol_type = other RNA
cgctctcctgggagtactg

SEQ ID NO: 1102 - RNA, 19 nt, synthetic construct
  source 1..19: mol_type = other RNA
gctctcctgggagtactgc

SEQ ID NO: 1103 - RNA, 19 nt, synthetic construct
  source 1..19: mol_type = other RNA
ctctcctgggagtactgcc

SEQ ID NO: 1104 - RNA, 19 nt, synthetic construct
  source 1..19: mol_type = other RNA
tctcctgggagtactgccg

SEQ ID NO: 1105 - RNA, 19 nt, synthetic construct
  source 1..19: mol_type = other RNA
ctcctgggagtactgccgc

SEQ ID NO: 1106 - RNA, 19 nt, synthetic construct
  source 1..19: mol_type = other RNA
tcctgggagtactgccgcc

SEQ ID NO: 1107 - RNA, 19 nt, synthetic construct
  source 1..19: mol_type = other RNA
cctgggagtactgccgcct

SEQ ID NO: 1108 - RNA, 19 nt, synthetic construct
  source 1..19: mol_type = other RNA
ctgggagtactgccgcctg

SEQ ID NO: 1109 - RNA, 19 nt, synthetic construct
  source 1..19: mol_type = other RNA
tgggagtactgccgcctgg

SEQ ID NO: 1110 - RNA, 19 nt, synthetic construct
  source 1..19: mol_type = other RNA
gggagtactgccgcctgga

SEQ ID NO: 1111 - RNA, 19 nt, synthetic construct
  source 1..19: mol_type = other RNA
ggagtactgccgcctggag

SEQ ID NO: 1112 - RNA, 19 nt, synthetic construct
  source 1..19: mol_type = other RNA
gagtactgccgcctggagg

SEQ ID NO: 1113 - RNA, 19 nt, synthetic construct
  source 1..19: mol_type = other RNA
agtactgccgcctggaggc

SEQ ID NO: 1114 - RNA, 19 nt, synthetic construct
  source 1..19: mol_type = other RNA
gtactgccgcctggaggcc

SEQ ID NO: 1115 - RNA, 19 nt, synthetic construct
  source 1..19: mol_type = other RNA
tactgccgcctggaggcct

SEQ ID NO: 1116 - RNA, 19 nt, synthetic construct
  source 1..19: mol_type = other RNA
actgccgcctggaggcctg

SEQ ID NO: 1117 - RNA, 19 nt, synthetic construct
  source 1..19: mol_type = other RNA
ctgccgcctggaggcctgc

SEQ ID NO: 1118 - RNA, 19 nt, synthetic construct
  source 1..19: mol_type = other RNA
tgccgcctggaggcctgcg

SEQ ID NO: 1119 - RNA, 19 nt, synthetic construct
  source 1..19: mol_type = other RNA
gccgcctggaggcctgcga

SEQ ID NO: 1120 - RNA, 19 nt, synthetic construct
  source 1..19: mol_type = other RNA
ccgcctggaggcctgcgaa

SEQ ID NO: 1121 - RNA, 19 nt, synthetic construct
  source 1..19: mol_type = other RNA
cgcctggaggcctgcgaat

SEQ ID NO: 1122 - RNA, 19 nt, synthetic construct
  source 1..19: mol_type = other RNA
gcctggaggcctgcgaatc

SEQ ID NO: 1123 - RNA, 19 nt, synthetic construct
  source 1..19: mol_type = other RNA
cctggaggcctgcgaatcc

SEQ ID NO: 1124 - RNA, 19 nt, synthetic construct
  source 1..19: mol_type = other RNA
ctggaggcctgcgaatccc

SEQ ID NO: 1125 - RNA, 19 nt, synthetic construct
  source 1..19: mol_type = other RNA
tggaggcctgcgaatccct

SEQ ID NO: 1126 - RNA, 19 nt, synthetic construct
  source 1..19: mol_type = other RNA
ggaggcctgcgaatccctc

SEQ ID NO: 1127 - RNA, 19 nt, synthetic construct
  source 1..19: mol_type = other RNA
gaggcctgcgaatccctca

SEQ ID NO: 1128 - RNA, 19 nt, synthetic construct
  source 1..19: mol_type = other RNA
aggcctgcgaatccctcac

SEQ ID NO: 1129 - RNA, 19 nt, synthetic construct
  source 1..19: mol_type = other RNA
ggcctgcgaatccctcacc

SEQ ID NO: 1130 - RNA, 19 nt, synthetic construct
  source 1..19: mol_type = other RNA
gcctgcgaatccctcacca

SEQ ID NO: 1131 - RNA, 19 nt, synthetic construct
  source 1..19: mol_type = other RNA
cctgcgaatccctcaccag

SEQ ID NO: 1132 - RNA, 19 nt, synthetic construct
  source 1..19: mol_type = other RNA
ctgcgaatccctcaccaga

SEQ ID NO: 1133 - RNA, 19 nt, synthetic construct
  source 1..19: mol_type = other RNA
tgcgaatccctcaccagag

SEQ ID NO: 1134 - RNA, 19 nt, synthetic construct
  source 1..19: mol_type = other RNA
gcgaatccctcaccagagt

SEQ ID NO: 1135 - RNA, 19 nt, synthetic construct
  source 1..19: mol_type = other RNA
cgaatccctcaccagagtc

SEQ ID NO: 1136 - RNA, 19 nt, synthetic construct
  source 1..19: mol_type = other RNA
gaatccctcaccagagtcc

SEQ ID NO: 1137 - RNA, 19 nt, synthetic construct
  source 1..19: mol_type = other RNA
aatccctcaccagagtcca

SEQ ID NO: 1138 - RNA, 19 nt, synthetic construct
  source 1..19: mol_type = other RNA
atccctcaccagagtccaa

SEQ ID NO: 1139 - RNA, 19 nt, synthetic construct
  source 1..19: mol_type = other RNA
tccctcaccagagtccaac

SEQ ID NO: 1140 - RNA, 19 nt, synthetic construct
  source 1..19: mol_type = other RNA
ccctcaccagagtccaact

SEQ ID NO: 1141 - RNA, 19 nt, synthetic construct
  source 1..19: mol_type = other RNA
cctcaccagagtccaactg

SEQ ID NO: 1142 - RNA, 19 nt, synthetic construct
  source 1..19: mol_type = other RNA
ctcaccagagtccaactgt

SEQ ID NO: 1143 - RNA, 19 nt, synthetic construct
  source 1..19: mol_type = other RNA
tcaccagagtccaactgtc

SEQ ID NO: 1144 - RNA, 19 nt, synthetic construct
  source 1..19: mol_type = other RNA
caccagagtccaactgtca

SEQ ID NO: 1145 - RNA, 19 nt, synthetic construct
  source 1..19: mol_type = other RNA
accagagtccaactgtcac

SEQ ID NO: 1146 - RNA, 19 nt, synthetic construct
  source 1..19: mol_type = other RNA
ccagagtccaactgtcacc

SEQ ID NO: 1147 - RNA, 19 nt, synthetic construct
  source 1..19: mol_type = other RNA
cagagtccaactgtcaccg

SEQ ID NO: 1148 - RNA, 19 nt, synthetic construct
  source 1..19: mol_type = other RNA
agagtccaactgtcaccgg

SEQ ID NO: 1149 - RNA, 19 nt, synthetic construct
  source 1..19: mol_type = other RNA
gagtccaactgtcaccgga

SEQ ID NO: 1150 - RNA, 19 nt, synthetic construct
  source 1..19: mol_type = other RNA
agtccaactgtcaccggat

SEQ ID NO: 1151 - RNA, 19 nt, synthetic construct
  source 1..19: mol_type = other RNA
gtccaactgtcaccggatc

SEQ ID NO: 1152 - RNA, 19 nt, synthetic construct
  source 1..19: mol_type = other RNA
tccaactgtcaccggatct

SEQ ID NO: 1153 - RNA, 19 nt, synthetic construct
  source 1..19: mol_type = other RNA
ccaactgtcaccggatctc

SEQ ID NO: 1154 - RNA, 19 nt, synthetic construct
  source 1..19: mol_type = other RNA
caactgtcaccggatctcc

SEQ ID NO: 1155 - RNA, 19 nt, synthetic construct
  source 1..19: mol_type = other RNA
aactgtcaccggatctcct

SEQ ID NO: 1156 - RNA, 19 nt, synthetic construct
  source 1..19: mol_type = other RNA
actgtcaccggatctcctg

SEQ ID NO: 1157 - RNA, 19 nt, synthetic construct
  source 1..19: mol_type = other RNA
ctgtcaccggatctcctgg

SEQ ID NO: 1158 - RNA, 19 nt, synthetic construct
  source 1..19: mol_type = other RNA
tgtcaccggatctcctggc

SEQ ID NO: 1159 - RNA, 19 nt, synthetic construct
  source 1..19: mol_type = other RNA
gtcaccggatctcctggcg

SEQ ID NO: 1160 - RNA, 19 nt, synthetic construct
  source 1..19: mol_type = other RNA
tcaccggatctcctggcga

SEQ ID NO: 1161 - RNA, 19 nt, synthetic construct
  source 1..19: mol_type = other RNA
caccggatctcctggcgac

SEQ ID NO: 1162 - RNA, 19 nt, synthetic construct
  source 1..19: mol_type = other RNA
accggatctcctggcgacc

SEQ ID NO: 1163 - RNA, 19 nt, synthetic construct
  source 1..19: mol_type = other RNA
ccggatctcctggcgaccc

SEQ ID NO: 1164 - RNA, 19 nt, synthetic construct
  source 1..19: mol_type = other RNA
cggatctcctggcgaccct

SEQ ID NO: 1165 - RNA, 19 nt, synthetic construct
  source 1..19: mol_type = other RNA
ggatctcctggcgaccctg

SEQ ID NO: 1166 - RNA, 19 nt, synthetic construct
  source 1..19: mol_type = other RNA
gatctcctggcgaccctgc

SEQ ID NO: 1167 - RNA, 19 nt, synthetic construct
  source 1..19: mol_type = other RNA
atctcctggcgaccctgcc

SEQ ID NO: 1168 - RNA, 19 nt, synthetic construct
  source 1..19: mol_type = other RNA
tctcctggcgaccctgcct

SEQ ID NO: 1169 - RNA, 19 nt, synthetic construct
  source 1..19: mol_type = other RNA
ctcctggcgaccctgcctg

SEQ ID NO: 1170 - RNA, 19 nt, synthetic construct
  source 1..19: mol_type = other RNA
tcctggcgaccctgcctga

SEQ ID NO: 1171 - RNA, 19 nt, synthetic construct
  source 1..19: mol_type = other RNA
cctggcgaccctgcctgag

SEQ ID NO: 1172 - RNA, 19 nt, synthetic construct
  source 1..19: mol_type = other RNA
ctggcgaccctgcctgagc

SEQ ID NO: 1173 - RNA, 19 nt, synthetic construct
  source 1..19: mol_type = other RNA
tggcgaccctgcctgagcc

SEQ ID NO: 1174 - RNA, 19 nt, synthetic construct
  source 1..19: mol_type = other RNA
ggcgaccctgcctgagcca

SEQ ID NO: 1175 - RNA, 19 nt, synthetic construct
  source 1..19: mol_type = other RNA
gcgaccctgcctgagccag

SEQ ID NO: 1176 - RNA, 19 nt, synthetic construct
  source 1..19: mol_type = other RNA
cgaccctgcctgagccagc

SEQ ID NO: 1177 - RNA, 19 nt, synthetic construct
  source 1..19: mol_type = other RNA
gaccctgcctgagccagcc

SEQ ID NO: 1178 - RNA, 19 nt, synthetic construct
  source 1..19: mol_type = other RNA
accctgcctgagccagcct

SEQ ID NO: 1179 - RNA, 19 nt, synthetic construct
  source 1..19: mol_type = other RNA
ccctgcctgagccagcctc

SEQ ID NO: 1180 - RNA, 19 nt, synthetic construct
  source 1..19: mol_type = other RNA
cctgcctgagccagcctcc

SEQ ID NO: 1181 - RNA, 19 nt, synthetic construct
  source 1..19: mol_type = other RNA
ctgcctgagccagcctccc

SEQ ID NO: 1182 - RNA, 19 nt, synthetic construct
  source 1..19: mol_type = other RNA
tgcctgagccagcctcccc

SEQ ID NO: 1183 - RNA, 19 nt, synthetic construct
  source 1..19: mol_type = other RNA
gcctgagccagcctccccg

SEQ ID NO: 1184 - RNA, 19 nt, synthetic construct
  source 1..19: mol_type = other RNA
cctgagccagcctccccgg

SEQ ID NO: 1185 - RNA, 19 nt, synthetic construct
  source 1..19: mol_type = other RNA
ctgagccagcctccccggg

SEQ ID NO: 1186 - RNA, 19 nt, synthetic construct
  source 1..19: mol_type = other RNA
tgagccagcctccccgggg

SEQ ID NO: 1187 - RNA, 19 nt, synthetic construct
  source 1..19: mol_type = other RNA
gagccagcctccccggggc

SEQ ID NO: 1188 - RNA, 19 nt, synthetic construct
  source 1..19: mol_type = other RNA
agccagcctccccggggcg

SEQ ID NO: 1189 - RNA, 19 nt, synthetic construct
  source 1..19: mol_type = other RNA
gccagcctccccggggcgc

SEQ ID NO: 1190 - RNA, 19 nt, synthetic construct
  source 1..19: mol_type = other RNA
ccagcctccccggggcgcc

SEQ ID NO: 1191 - RNA, 19 nt, synthetic construct
  source 1..19: mol_type = other RNA
cagcctccccggggcgcca

SEQ ID NO: 1192 - RNA, 19 nt, synthetic construct
  source 1..19: mol_type = other RNA
agcctccccggggcgccag

SEQ ID NO: 1193 - RNA, 19 nt, synthetic construct
  source 1..19: mol_type = other RNA
gcctccccggggcgccagg

SEQ ID NO: 1194 - RNA, 19 nt, synthetic construct
  source 1..19: mol_type = other RNA
cctccccggggcgccaggc

SEQ ID NO: 1195 - RNA, 19 nt, synthetic construct
  source 1..19: mol_type = other RNA
ctccccggggcgccaggcc

SEQ ID NO: 1196 - RNA, 19 nt, synthetic construct
  source 1..19: mol_type = other RNA
tccccggggcgccaggcct

SEQ ID NO: 1197 - RNA, 19 nt, synthetic construct
  source 1..19: mol_type = other RNA
ccccggggcgccaggcctg

SEQ ID NO: 1198 - RNA, 19 nt, synthetic construct
  source 1..19: mol_type = other RNA
cccggggcgccaggcctgc

SEQ ID NO: 1199 - RNA, 19 nt, synthetic construct
  source 1..19: mol_type = other RNA
ccggggcgccaggcctgcg

SEQ ID NO: 1200 - RNA, 19 nt, synthetic construct
  source 1..19: mol_type = other RNA
cggggcgccaggcctgcgg

SEQ ID NO: 1201 - RNA, 19 nt, synthetic construct
  source 1..19: mol_type = other RNA
ggggcgccaggcctgcggc

SEQ ID NO: 1202 - RNA, 19 nt, synthetic construct
  source 1..19: mol_type = other RNA
gggcgccaggcctgcggca

SEQ ID NO: 1203 - RNA, 19 nt, synthetic construct
  source 1..19: mol_type = other RNA
ggcgccaggcctgcggcag

SEQ ID NO: 1204 - RNA, 19 nt, synthetic construct
  source 1..19: mol_type = other RNA
gcgccaggcctgcggcagg

SEQ ID NO: 1205 - RNA, 19 nt, synthetic construct
  source 1..19: mol_type = other RNA
cgccaggcctgcggcagga

SEQ ID NO: 1206 - RNA, 19 nt, synthetic construct
  source 1..19: mol_type = other RNA
gccaggcctgcggcaggag

SEQ ID NO: 1207 - RNA, 19 nt, synthetic construct
  source 1..19: mol_type = other RNA
ccaggcctgcggcaggagg

SEQ ID NO: 1208 - RNA, 19 nt, synthetic construct
  source 1..19: mol_type = other RNA
caggcctgcggcaggaggc

SEQ ID NO: 1209 - RNA, 19 nt, synthetic construct
  source 1..19: mol_type = other RNA
aggcctgcggcaggaggca

SEQ ID NO: 1210 - RNA, 19 nt, synthetic construct
  source 1..19: mol_type = other RNA
ggcctgcggcaggaggcac

SEQ ID NO: 1211 - RNA, 19 nt, synthetic construct
  source 1..19: mol_type = other RNA
gcctgcggcaggaggcaca

SEQ ID NO: 1212 - RNA, 19 nt, synthetic construct
  source 1..19: mol_type = other RNA
cctgcggcaggaggcacaa

SEQ ID NO: 1213 - RNA, 19 nt, synthetic construct
  source 1..19: mol_type = other RNA
ctgcggcaggaggcacaag

SEQ ID NO: 1214 - RNA, 19 nt, synthetic construct
  source 1..19: mol_type = other RNA
tgcggcaggaggcacaaga

SEQ ID NO: 1215 - RNA, 19 nt, synthetic construct
  source 1..19: mol_type = other RNA
gcggcaggaggcacaagaa

SEQ ID NO: 1216 - RNA, 19 nt, synthetic construct
  source 1..19: mol_type = other RNA
cggcaggaggcacaagaag

SEQ ID NO: 1217 - RNA, 19 nt, synthetic construct
  source 1..19: mol_type = other RNA
ggcaggaggcacaagaaga

SEQ ID NO: 1218 - RNA, 19 nt, synthetic construct
  source 1..19: mol_type = other RNA
gcaggaggcacaagaagag

SEQ ID NO: 1219 - RNA, 19 nt, synthetic construct
  source 1..19: mol_type = other RNA
caggaggcacaagaagagg

SEQ ID NO: 1220 - RNA, 19 nt, synthetic construct
  source 1..19: mol_type = other RNA
aggaggcacaagaagagga

SEQ ID NO: 1221 - RNA, 19 nt, synthetic construct
  source 1..19: mol_type = other RNA
ggaggcacaagaagaggac

SEQ ID NO: 1222 - RNA, 19 nt, synthetic construct
  source 1..19: mol_type = other RNA
gaggcacaagaagaggacg

SEQ ID NO: 1223 - RNA, 19 nt, synthetic construct
  source 1..19: mol_type = other RNA
aggcacaagaagaggacgt

SEQ ID NO: 1224 - RNA, 19 nt, synthetic construct
  source 1..19: mol_type = other RNA
ggcacaagaagaggacgtt

SEQ ID NO: 1225 - RNA, 19 nt, synthetic construct
  source 1..19: mol_type = other RNA
gcacaagaagaggacgttc

SEQ ID NO: 1226 - RNA, 19 nt, synthetic construct
  source 1..19: mol_type = other RNA
cacaagaagaggacgttcc

SEQ ID NO: 1227 - RNA, 19 nt, synthetic construct
  source 1..19: mol_type = other RNA
acaagaagaggacgttcct

SEQ ID NO: 1228 - RNA, 19 nt, synthetic construct
  source 1..19: mol_type = other RNA
caagaagaggacgttcctg

SEQ ID NO: 1229 - RNA, 19 nt, synthetic construct
  source 1..19: mol_type = other RNA
aagaagaggacgttcctgc

SEQ ID NO: 1230 - RNA, 19 nt, synthetic construct
  source 1..19: mol_type = other RNA
agaagaggacgttcctgcg

SEQ ID NO: 1231 - RNA, 19 nt, synthetic construct
  source 1..19: mol_type = other RNA
gaagaggacgttcctgcgg

SEQ ID NO: 1232 - RNA, 19 nt, synthetic construct
  source 1..19: mol_type = other RNA
aagaggacgttcctgcggc

SEQ ID NO: 1233 - RNA, 19 nt, synthetic construct
  source 1..19: mol_type = other RNA
agaggacgttcctgcggcc

SEQ ID NO: 1234 - RNA, 19 nt, synthetic construct
  source 1..19: mol_type = other RNA
gaggacgttcctgcggcca

SEQ ID NO: 1235 - RNA, 19 nt, synthetic construct
  source 1..19: mol_type = other RNA
aggacgttcctgcggccac

SEQ ID NO: 1236 - RNA, 19 nt, synthetic construct
  source 1..19: mol_type = other RNA
ggacgttcctgcggccacg

SEQ ID NO: 1237 - RNA, 19 nt, synthetic construct
  source 1..19: mol_type = other RNA
gacgttcctgcggccacgt

SEQ ID NO: 1238 - RNA, 19 nt, synthetic construct
  source 1..19: mol_type = other RNA
acgttcctgcggccacgta

SEQ ID NO: 1239 - RNA, 19 nt, synthetic construct
  source 1..19: mol_type = other RNA
cgttcctgcggccacgtat

SEQ ID NO: 1240 - RNA, 19 nt, synthetic construct
  source 1..19: mol_type = other RNA
gttcctgcggccacgtatc

SEQ ID NO: 1241 - RNA, 19 nt, synthetic construct
  source 1..19: mol_type = other RNA
ttcctgcggccacgtatca

SEQ ID NO: 1242 - RNA, 19 nt, synthetic construct
  source 1..19: mol_type = other RNA
tcctgcggccacgtatcat

SEQ ID NO: 1243 - RNA, 19 nt, synthetic construct
  source 1..19: mol_type = other RNA
cctgcggccacgtatcatc

SEQ ID NO: 1244 - RNA, 19 nt, synthetic construct
  source 1..19: mol_type = other RNA
ctgcggccacgtatcatcg

SEQ ID NO: 1245 - RNA, 19 nt, synthetic construct
  source 1..19: mol_type = other RNA
tgcggccacgtatcatcgg

SEQ ID NO: 1246 - RNA, 19 nt, synthetic construct
  source 1..19: mol_type = other RNA
gcggccacgtatcatcggc

SEQ ID NO: 1247 - RNA, 19 nt, synthetic construct
  source 1..19: mol_type = other RNA
cggccacgtatcatcggcg

SEQ ID NO: 1248 - RNA, 19 nt, synthetic construct
  source 1..19: mol_type = other RNA
ggccacgtatcatcggcgg

SEQ ID NO: 1249 - RNA, 19 nt, synthetic construct
  source 1..19: mol_type = other RNA
gccacgtatcatcggcggc

SEQ ID NO: 1250 - RNA, 19 nt, synthetic construct
  source 1..19: mol_type = other RNA
ccacgtatcatcggcggct

SEQ ID NO: 1251 - RNA, 19 nt, synthetic construct
  source 1..19: mol_type = other RNA
cacgtatcatcggcggctc

SEQ ID NO: 1252 - RNA, 19 nt, synthetic construct
  source 1..19: mol_type = other RNA
acgtatcatcggcggctcc

SEQ ID NO: 1253 - RNA, 19 nt, synthetic construct
  source 1..19: mol_type = other RNA
cgtatcatcggcggctcct

SEQ ID NO: 1254 - RNA, 19 nt, synthetic construct
  source 1..19: mol_type = other RNA
gtatcatcggcggctcctc

SEQ ID NO: 1255 - RNA, 19 nt, synthetic construct
  source 1..19: mol_type = other RNA
tatcatcggcggctcctcc

SEQ ID NO: 1256 - RNA, 19 nt, synthetic construct
  source 1..19: mol_type = other RNA
atcatcggcggctcctcct

SEQ ID NO: 1257 - RNA, 19 nt, synthetic construct
  source 1..19: mol_type = other RNA
tcatcggcggctcctcctc

SEQ ID NO: 1258 - RNA, 19 nt, synthetic construct
  source 1..19: mol_type = other RNA
catcggcggctcctcctcg

SEQ ID NO: 1259 - RNA, 19 nt, synthetic construct
  source 1..19: mol_type = other RNA
atcggcggctcctcctcgc

SEQ ID NO: 1260 - RNA, 19 nt, synthetic construct
  source 1..19: mol_type = other RNA
tcggcggctcctcctcgct

SEQ ID NO: 1261 - RNA, 19 nt, synthetic construct
  source 1..19: mol_type = other RNA
cggcggctcctcctcgctg

SEQ ID NO: 1262 - RNA, 19 nt, synthetic construct
  source 1..19: mol_type = other RNA
ggcggctcctcctcgctgc

SEQ ID NO: 1263 - RNA, 19 nt, synthetic construct
  source 1..19: mol_type = other RNA
gcggctcctcctcgctgcc

SEQ ID NO: 1264 - RNA, 19 nt, synthetic construct
  source 1..19: mol_type = other RNA
cggctcctcctcgctgccc

SEQ ID NO: 1265 - RNA, 19 nt, synthetic construct
  source 1..19: mol_type = other RNA
ggctcctcctcgctgcccg

SEQ ID NO: 1266 - RNA, 19 nt, synthetic construct
  source 1..19: mol_type = other RNA
gctcctcctcgctgcccgg

SEQ ID NO: 1267 - RNA, 19 nt, synthetic construct
  source 1..19: mol_type = other RNA
ctcctcctcgctgcccggc

SEQ ID NO: 1268 - RNA, 19 nt, synthetic construct
  source 1..19: mol_type = other RNA
tcctcctcgctgcccggct

SEQ ID NO: 1269 - RNA, 19 nt, synthetic construct
  source 1..19: mol_type = other RNA
cctcctcgctgcccggctc

SEQ ID NO: 1270 - RNA, 19 nt, synthetic construct
  source 1..19: mol_type = other RNA
ctcctcgctgcccggctcg

SEQ ID NO: 1271 - RNA, 19 nt, synthetic construct
  source 1..19: mol_type = other RNA
tcctcgctgcccggctcgc

SEQ ID NO: 1272 - RNA, 19 nt, synthetic construct
  source 1..19: mol_type = other RNA
cctcgctgcccggctcgca

SEQ ID NO: 1273 - RNA, 19 nt, synthetic construct
  source 1..19: mol_type = other RNA
ctcgctgcccggctcgcac

SEQ ID NO: 1274 - RNA, 19 nt, synthetic construct
  source 1..19: mol_type = other RNA
tcgctgcccggctcgcacc

SEQ ID NO: 1275 - RNA, 19 nt, synthetic construct
  source 1..19: mol_type = other RNA
cgctgcccggctcgcaccc

SEQ ID NO: 1276 - RNA, 19 nt, synthetic construct
  source 1..19: mol_type = other RNA
gctgcccggctcgcacccc

SEQ ID NO: 1277 - RNA, 19 nt, synthetic construct
  source 1..19: mol_type = other RNA
ctgcccggctcgcacccct

SEQ ID NO: 1278 - RNA, 19 nt, synthetic construct
  source 1..19: mol_type = other RNA
tgcccggctcgcacccctg

SEQ ID NO: 1279 - RNA, 19 nt, synthetic construct
  source 1..19: mol_type = other RNA
gcccggctcgcacccctgg

SEQ ID NO: 1280 - RNA, 19 nt, synthetic construct
  source 1..19: mol_type = other RNA
cccggctcgcacccctggc

SEQ ID NO: 1281 - RNA, 19 nt, synthetic construct
  source 1..19: mol_type = other RNA
ccggctcgcacccctggct

SEQ ID NO: 1282 - RNA, 19 nt, synthetic construct
  source 1..19: mol_type = other RNA
cggctcgcacccctggctg

SEQ ID NO: 1283 - RNA, 19 nt, synthetic construct
  source 1..19: mol_type = other RNA
ggctcgcacccctggctgg

SEQ ID NO: 1284 - RNA, 19 nt, synthetic construct
  source 1..19: mol_type = other RNA
gctcgcacccctggctggc

SEQ ID NO: 1285 - RNA, 19 nt, synthetic construct
  source 1..19: mol_type = other RNA
ctcgcacccctggctggcc

SEQ ID NO: 1286 - RNA, 19 nt, synthetic construct
  source 1..19: mol_type = other RNA
tcgcacccctggctggccg

SEQ ID NO: 1287 - RNA, 19 nt, synthetic construct
  source 1..19: mol_type = other RNA
cgcacccctggctggccgc

SEQ ID NO: 1288 - RNA, 19 nt, synthetic construct
  source 1..19: mol_type = other RNA
gcacccctggctggccgcc

SEQ ID NO: 1289 - RNA, 19 nt, synthetic construct
  source 1..19: mol_type = other RNA
cacccctggctggccgcca

SEQ ID NO: 1290 - RNA, 19 nt, synthetic construct
  source 1..19: mol_type = other RNA
acccctggctggccgccat

SEQ ID NO: 1291 - RNA, 19 nt, synthetic construct
  source 1..19: mol_type = other RNA
cccctggctggccgccatc

SEQ ID NO: 1292 - RNA, 19 nt, synthetic construct
  source 1..19: mol_type = other RNA
ccctggctggccgccatct

SEQ ID NO: 1293 - RNA, 19 nt, synthetic construct
  source 1..19: mol_type = other RNA
cctggctggccgccatcta

SEQ ID NO: 1294 - RNA, 19 nt, synthetic construct
  source 1..19: mol_type = other RNA
ctggctggccgccatctac

SEQ ID NO: 1295 - RNA, 19 nt, synthetic construct
  source 1..19: mol_type = other RNA
tggctggccgccatctaca

SEQ ID NO: 1296 - RNA, 19 nt, synthetic construct
  source 1..19: mol_type = other RNA
ggctggccgccatctacat

SEQ ID NO: 1297 - RNA, 19 nt, synthetic construct
  source 1..19: mol_type = other RNA
gctggccgccatctacatc

SEQ ID NO: 1298 - RNA, 19 nt, synthetic construct
  source 1..19: mol_type = other RNA
ctggccgccatctacatcg

SEQ ID NO: 1299 - RNA, 19 nt, synthetic construct
  source 1..19: mol_type = other RNA
tggccgccatctacatcgg

SEQ ID NO: 1300 - RNA, 19 nt, synthetic construct
  source 1..19: mol_type = other RNA
ggccgccatctacatcggg

SEQ ID NO: 1301 - RNA, 19 nt, synthetic construct
  source 1..19: mol_type = other RNA
gccgccatctacatcgggg

SEQ ID NO: 1302 - RNA, 19 nt, synthetic construct
  source 1..19: mol_type = other RNA
ccgccatctacatcgggga

SEQ ID NO: 1303 - RNA, 19 nt, synthetic construct
  source 1..19: mol_type = other RNA
cgccatctacatcggggac

SEQ ID NO: 1304 - RNA, 19 nt, synthetic construct
  source 1..19: mol_type = other RNA
gccatctacatcggggaca

SEQ ID NO: 1305 - RNA, 19 nt, synthetic construct
  source 1..19: mol_type = other RNA
ccatctacatcggggacag

SEQ ID NO: 1306 - RNA, 19 nt, synthetic construct
  source 1..19: mol_type = other RNA
catctacatcggggacagc

SEQ ID NO: 1307 - RNA, 19 nt, synthetic construct
  source 1..19: mol_type = other RNA
atctacatcggggacagct

SEQ ID NO: 1308 - RNA, 19 nt, synthetic construct
  source 1..19: mol_type = other RNA
tctacatcggggacagctt

SEQ ID NO: 1309 - RNA, 19 nt, synthetic construct
  source 1..19: mol_type = other RNA
ctacatcggggacagcttc

SEQ ID NO: 1310 - RNA, 19 nt, synthetic construct
  source 1..19: mol_type = other RNA
tacatcggggacagcttct

SEQ ID NO: 1311 - RNA, 19 nt, synthetic construct
  source 1..19: mol_type = other RNA
acatcggggacagcttctg

SEQ ID NO: 1312 - RNA, 19 nt, synthetic construct
  source 1..19: mol_type = other RNA
catcggggacagcttctgc

SEQ ID NO: 1313 - RNA, 19 nt, synthetic construct
  source 1..19: mol_type = other RNA
atcggggacagcttctgcg

SEQ ID NO: 1314 - RNA, 19 nt, synthetic construct
  source 1..19: mol_type = other RNA
tcggggacagcttctgcgc

SEQ ID NO: 1315 - RNA, 19 nt, synthetic construct
  source 1..19: mol_type = other RNA
cggggacagcttctgcgcc

SEQ ID NO: 1316 - RNA, 19 nt, synthetic construct
  source 1..19: mol_type = other RNA
ggggacagcttctgcgccg

SEQ ID NO: 1317 - RNA, 19 nt, synthetic construct
  source 1..19: mol_type = other RNA
gggacagcttctgcgccgg

SEQ ID NO: 1318 - RNA, 19 nt, synthetic construct
  source 1..19: mol_type = other RNA
ggacagcttctgcgccggg

SEQ ID NO: 1319 - RNA, 19 nt, synthetic construct
  source 1..19: mol_type = other RNA
gacagcttctgcgccggga

SEQ ID NO: 1320 - RNA, 19 nt, synthetic construct
  source 1..19: mol_type = other RNA
acagcttctgcgccgggag

SEQ ID NO: 1321 - RNA, 19 nt, synthetic construct
  source 1..19: mol_type = other RNA
cagcttctgcgccgggagc

SEQ ID NO: 1322 - RNA, 19 nt, synthetic construct
  source 1..19: mol_type = other RNA
agcttctgcgccgggagcc

SEQ ID NO: 1323 - RNA, 19 nt, synthetic construct
  source 1..19: mol_type = other RNA
gcttctgcgccgggagcct

SEQ ID NO: 1324 - RNA, 19 nt, synthetic construct
  source 1..19: mol_type = other RNA
cttctgcgccgggagcctg

SEQ ID NO: 1325 - RNA, 19 nt, synthetic construct
  source 1..19: mol_type = other RNA
ttctgcgccgggagcctgg

SEQ ID NO: 1326 - RNA, 19 nt, synthetic construct
  source 1..19: mol_type = other RNA
tctgcgccgggagcctggt

SEQ ID NO: 1327 - RNA, 19 nt, synthetic construct
  source 1..19: mol_type = other RNA
ctgcgccgggagcctggtc

SEQ ID NO: 1328 - RNA, 19 nt, synthetic construct
  source 1..19: mol_type = other RNA
tgcgccgggagcctggtcc

SEQ ID NO: 1329 - RNA, 19 nt, synthetic construct
  source 1..19: mol_type = other RNA
gcgccgggagcctggtcca

SEQ ID NO: 1330 - RNA, 19 nt, synthetic construct
  source 1..19: mol_type = other RNA
cgccgggagcctggtccac

SEQ ID NO: 1331 - RNA, 19 nt, synthetic construct
  source 1..19: mol_type = other RNA
gccgggagcctggtccaca

SEQ ID NO: 1332 - RNA, 19 nt, synthetic construct
  source 1..19: mol_type = other RNA
ccgggagcctggtccacac

SEQ ID NO: 1333 - RNA, 19 nt, synthetic construct
  source 1..19: mol_type = other RNA
cgggagcctggtccacacc

SEQ ID NO: 1334 - RNA, 19 nt, synthetic construct
  source 1..19: mol_type = other RNA
gggagcctggtccacacct

SEQ ID NO: 1335 - RNA, 19 nt, synthetic construct
  source 1..19: mol_type = other RNA
ggagcctggtccacacctg

SEQ ID NO: 1336 - RNA, 19 nt, synthetic construct
  source 1..19: mol_type = other RNA
gagcctggtccacacctgc

SEQ ID NO: 1337 - RNA, 19 nt, synthetic construct
  source 1..19: mol_type = other RNA
agcctggtccacacctgct

SEQ ID NO: 1338 - RNA, 19 nt, synthetic construct
  source 1..19: mol_type = other RNA
gcctggtccacacctgctg

SEQ ID NO: 1339 - RNA, 19 nt, synthetic construct
  source 1..19: mol_type = other RNA
cctggtccacacctgctgg

SEQ ID NO: 1340 - RNA, 19 nt, synthetic construct
  source 1..19: mol_type = other RNA
ctggtccacacctgctggg

SEQ ID NO: 1341 - RNA, 19 nt, synthetic construct
  source 1..19: mol_type = other RNA
tggtccacacctgctgggt

SEQ ID NO: 1342 - RNA, 19 nt, synthetic construct
  source 1..19: mol_type = other RNA
ggtccacacctgctgggtg

SEQ ID NO: 1343 - RNA, 19 nt, synthetic construct
  source 1..19: mol_type = other RNA
gtccacacctgctgggtgg

SEQ ID NO: 1344 - RNA, 19 nt, synthetic construct
  source 1..19: mol_type = other RNA
tccacacctgctgggtggt

SEQ ID NO: 1345 - RNA, 19 nt, synthetic construct
  source 1..19: mol_type = other RNA
ccacacctgctgggtggtg

SEQ ID NO: 1346 - RNA, 19 nt, synthetic construct
  source 1..19: mol_type = other RNA
cacacctgctgggtggtgt

SEQ ID NO: 1347 - RNA, 19 nt, synthetic construct
  source 1..19: mol_type = other RNA
acacctgctgggtggtgtc

SEQ ID NO: 1348 - RNA, 19 nt, synthetic construct
  source 1..19: mol_type = other RNA
cacctgctgggtggtgtcg

SEQ ID NO: 1349 - RNA, 19 nt, synthetic construct
  source 1..19: mol_type = other RNA
acctgctgggtggtgtcgg

SEQ ID NO: 1350 - RNA, 19 nt, synthetic construct
  source 1..19: mol_type = other RNA
cctgctgggtggtgtcggc

SEQ ID NO: 1351 - RNA, 19 nt, synthetic construct
  source 1..19: mol_type = other RNA
ctgctgggtggtgtcggcc

SEQ ID NO: 1352 - RNA, 19 nt, synthetic construct
  source 1..19: mol_type = other RNA
tgctgggtggtgtcggccg

SEQ ID NO: 1353 - RNA, 19 nt, synthetic construct
  source 1..19: mol_type = other RNA
gctgggtggtgtcggccgc

SEQ ID NO: 1354 - RNA, 19 nt, synthetic construct
  source 1..19: mol_type = other RNA
ctgggtggtgtcggccgcc

SEQ ID NO: 1355 - RNA, 19 nt, synthetic construct
  source 1..19: mol_type = other RNA
tgggtggtgtcggccgccc

SEQ ID NO: 1356 - RNA, 19 nt, synthetic construct
  source 1..19: mol_type = other RNA
gggtggtgtcggccgccca

SEQ ID NO: 1357 - RNA, 19 nt, synthetic construct
  source 1..19: mol_type = other RNA
ggtggtgtcggccgcccac

SEQ ID NO: 1358 - RNA, 19 nt, synthetic construct
  source 1..19: mol_type = other RNA
gtggtgtcggccgcccact

SEQ ID NO: 1359 - RNA, 19 nt, synthetic construct
  source 1..19: mol_type = other RNA
tggtgtcggccgcccactg

SEQ ID NO: 1360 - RNA, 19 nt, synthetic construct
  source 1..19: mol_type = other RNA
ggtgtcggccgcccactgc

SEQ ID NO: 1361 - RNA, 19 nt, synthetic construct
  source 1..19: mol_type = other RNA
gtgtcggccgcccactgct

SEQ ID NO: 1362 - RNA, 19 nt, synthetic construct
  source 1..19: mol_type = other RNA
tgtcggccgcccactgctt

SEQ ID NO: 1363 - RNA, 19 nt, synthetic construct
  source 1..19: mol_type = other RNA
gtcggccgcccactgcttc

SEQ ID NO: 1364 - RNA, 19 nt, synthetic construct
  source 1..19: mol_type = other RNA
tcggccgcccactgcttct

SEQ ID NO: 1365 - RNA, 19 nt, synthetic construct
  source 1..19: mol_type = other RNA
cggccgcccactgcttctc

SEQ ID NO: 1366 - RNA, 19 nt, synthetic construct
  source 1..19: mol_type = other RNA
ggccgcccactgcttctcc

SEQ ID NO: 1367 - RNA, 19 nt, synthetic construct
  source 1..19: mol_type = other RNA
gccgcccactgcttctccc

SEQ ID NO: 1368 - RNA, 19 nt, synthetic construct
  source 1..19: mol_type = other RNA
ccgcccactgcttctccca

SEQ ID NO: 1369 - RNA, 19 nt, synthetic construct
  source 1..19: mol_type = other RNA
cgcccactgcttctcccac

SEQ ID NO: 1370 - RNA, 19 nt, synthetic construct
  source 1..19: mol_type = other RNA
gcccactgcttctcccaca

SEQ ID NO: 1371 - RNA, 19 nt, synthetic construct
  source 1..19: mol_type = other RNA
cccactgcttctcccacag

SEQ ID NO: 1372 - RNA, 19 nt, synthetic construct
  source 1..19: mol_type = other RNA
ccactgcttctcccacagc

SEQ ID NO: 1373 - RNA, 19 nt, synthetic construct
  source 1..19: mol_type = other RNA
cactgcttctcccacagcc

SEQ ID NO: 1374 - RNA, 19 nt, synthetic construct
  source 1..19: mol_type = other RNA
actgcttctcccacagccc

SEQ ID NO: 1375 - RNA, 19 nt, synthetic construct
  source 1..19: mol_type = other RNA
ctgcttctcccacagcccc

SEQ ID NO: 1376 - RNA, 19 nt, synthetic construct
  source 1..19: mol_type = other RNA
tgcttctcccacagccccc

SEQ ID NO: 1377 - RNA, 19 nt, synthetic construct
  source 1..19: mol_type = other RNA
gcttctcccacagcccccc

SEQ ID NO: 1378 - RNA, 19 nt, synthetic construct
  source 1..19: mol_type = other RNA
cttctcccacagccccccc

SEQ ID NO: 1379 - RNA, 19 nt, synthetic construct
  source 1..19: mol_type = other RNA
ttctcccacagccccccca

SEQ ID NO: 1380 - RNA, 19 nt, synthetic construct
  source 1..19: mol_type = other RNA
tctcccacagcccccccag

SEQ ID NO: 1381 - RNA, 19 nt, synthetic construct
  source 1..19: mol_type = other RNA
ctcccacagcccccccagg

SEQ ID NO: 1382 - RNA, 19 nt, synthetic construct
  source 1..19: mol_type = other RNA
tcccacagcccccccaggg

SEQ ID NO: 1383 - RNA, 19 nt, synthetic construct
  source 1..19: mol_type = other RNA
cccacagcccccccaggga

SEQ ID NO: 1384 - RNA, 19 nt, synthetic construct
  source 1..19: mol_type = other RNA
ccacagcccccccagggac

SEQ ID NO: 1385 - RNA, 19 nt, synthetic construct
  source 1..19: mol_type = other RNA
cacagcccccccagggaca

SEQ ID NO: 1386 - RNA, 19 nt, synthetic construct
  source 1..19: mol_type = other RNA
acagcccccccagggacag

SEQ ID NO: 1387 - RNA, 19 nt, synthetic construct
  source 1..19: mol_type = other RNA
cagcccccccagggacagc

SEQ ID NO: 1388 - RNA, 19 nt, synthetic construct
  source 1..19: mol_type = other RNA
agcccccccagggacagcg

SEQ ID NO: 1389 - RNA, 19 nt, synthetic construct
  source 1..19: mol_type = other RNA
gcccccccagggacagcgt

SEQ ID NO: 1390 - RNA, 19 nt, synthetic construct
  source 1..19: mol_type = other RNA
cccccccagggacagcgtc

SEQ ID NO: 1391 - RNA, 19 nt, synthetic construct
  source 1..19: mol_type = other RNA
ccccccagggacagcgtct

SEQ ID NO: 1392 - RNA, 19 nt, synthetic construct
  source 1..19: mol_type = other RNA
cccccagggacagcgtctc

SEQ ID NO: 1393 - RNA, 19 nt, synthetic construct
  source 1..19: mol_type = other RNA
ccccagggacagcgtctcc

SEQ ID NO: 1394 - RNA, 19 nt, synthetic construct
  source 1..19: mol_type = other RNA
cccagggacagcgtctccg

SEQ ID NO: 1395 - RNA, 19 nt, synthetic construct
  source 1..19: mol_type = other RNA
ccagggacagcgtctccgt

SEQ ID NO: 1396 - RNA, 19 nt, synthetic construct
  source 1..19: mol_type = other RNA
cagggacagcgtctccgtg

SEQ ID NO: 1397 - RNA, 19 nt, synthetic construct
  source 1..19: mol_type = other RNA
agggacagcgtctccgtgg

SEQ ID NO: 1398 - RNA, 19 nt, synthetic construct
  source 1..19: mol_type = other RNA
gggacagcgtctccgtggt

SEQ ID NO: 1399 - RNA, 19 nt, synthetic construct
  source 1..19: mol_type = other RNA
ggacagcgtctccgtggtg

SEQ ID NO: 1400 - RNA, 19 nt, synthetic construct
  source 1..19: mol_type = other RNA
gacagcgtctccgtggtgc

SEQ ID NO: 1401 - RNA, 19 nt, synthetic construct
  source 1..19: mol_type = other RNA
acagcgtctccgtggtgct

SEQ ID NO: 1402 - RNA, 19 nt, synthetic construct
  source 1..19: mol_type = other RNA
cagcgtctccgtggtgctg

SEQ ID NO: 1403 - RNA, 19 nt, synthetic construct
  source 1..19: mol_type = other RNA
agcgtctccgtggtgctgg

SEQ ID NO: 1404 - RNA, 19 nt, synthetic construct
  source 1..19: mol_type = other RNA
gcgtctccgtggtgctggg

SEQ ID NO: 1405 - RNA, 19 nt, synthetic construct
  source 1..19: mol_type = other RNA
cgtctccgtggtgctgggc

SEQ ID NO: 1406 - RNA, 19 nt, synthetic construct
  source 1..19: mol_type = other RNA
gtctccgtggtgctgggcc

SEQ ID NO: 1407 - RNA, 19 nt, synthetic construct
  source 1..19: mol_type = other RNA
tctccgtggtgctgggcca

SEQ ID NO: 1408 - RNA, 19 nt, synthetic construct
  source 1..19: mol_type = other RNA
ctccgtggtgctgggccag

SEQ ID NO: 1409 - RNA, 19 nt, synthetic construct
  source 1..19: mol_type = other RNA
tccgtggtgctgggccagc

SEQ ID NO: 1410 - RNA, 19 nt, synthetic construct
  source 1..19: mol_type = other RNA
ccgtggtgctgggccagca

SEQ ID NO: 1411 - RNA, 19 nt, synthetic construct
  source 1..19: mol_type = other RNA
cgtggtgctgggccagcac

SEQ ID NO: 1412 - RNA, 19 nt, synthetic construct
  source 1..19: mol_type = other RNA
gtggtgctgggccagcact

SEQ ID NO: 1413 - RNA, 19 nt, synthetic construct
  source 1..19: mol_type = other RNA
tggtgctgggccagcactt

SEQ ID NO: 1414 - RNA, 19 nt, synthetic construct
  source 1..19: mol_type = other RNA
ggtgctgggccagcacttc

SEQ ID NO: 1415 - RNA, 19 nt, synthetic construct
  source 1..19: mol_type = other RNA
gtgctgggccagcacttct

SEQ ID NO: 1416 - RNA, 19 nt, synthetic construct
  source 1..19: mol_type = other RNA
tgctgggccagcacttctt

SEQ ID NO: 1417 - RNA, 19 nt, synthetic construct
  source 1..19: mol_type = other RNA
gctgggccagcacttcttc

SEQ ID NO: 1418 - RNA, 19 nt, synthetic construct
  source 1..19: mol_type = other RNA
ctgggccagcacttcttca

SEQ ID NO: 1419 - RNA, 19 nt, synthetic construct
  source 1..19: mol_type = other RNA
tgggccagcacttcttcaa

SEQ ID NO: 1420 - RNA, 19 nt, synthetic construct
  source 1..19: mol_type = other RNA
gggccagcacttcttcaac

SEQ ID NO: 1421 - RNA, 19 nt, synthetic construct
  source 1..19: mol_type = other RNA
ggccagcacttcttcaacc

SEQ ID NO: 1422 - RNA, 19 nt, synthetic construct
  source 1..19: mol_type = other RNA
gccagcacttcttcaaccg

SEQ ID NO: 1423 - RNA, 19 nt, synthetic construct
  source 1..19: mol_type = other RNA
ccagcacttcttcaaccgc

SEQ ID NO: 1424 - RNA, 19 nt, synthetic construct
  source 1..19: mol_type = other RNA
cagcacttcttcaaccgca

SEQ ID NO: 1425 - RNA, 19 nt, synthetic construct
  source 1..19: mol_type = other RNA
agcacttcttcaaccgcac

SEQ ID NO: 1426 - RNA, 19 nt, synthetic construct
  source 1..19: mol_type = other RNA
gcacttcttcaaccgcacg

SEQ ID NO: 1427 - RNA, 19 nt, synthetic construct
  source 1..19: mol_type = other RNA
cacttcttcaaccgcacga

SEQ ID NO: 1428 - RNA, 19 nt, synthetic construct
  source 1..19: mol_type = other RNA
acttcttcaaccgcacgac

SEQ ID NO: 1429 - RNA, 19 nt, synthetic construct
  source 1..19: mol_type = other RNA
cttcttcaaccgcacgacg

SEQ ID NO: 1430 - RNA, 19 nt, synthetic construct
  source 1..19: mol_type = other RNA
ttcttcaaccgcacgacgg

SEQ ID NO: 1431 - RNA, 19 nt, synthetic construct
  source 1..19: mol_type = other RNA
tcttcaaccgcacgacgga

SEQ ID NO: 1432 - RNA, 19 nt, synthetic construct
  source 1..19: mol_type = other RNA
cttcaaccgcacgacggac

SEQ ID NO: 1433 - RNA, 19 nt, synthetic construct
  source 1..19: mol_type = other RNA
ttcaaccgcacgacggacg

SEQ ID NO: 1434 - RNA, 19 nt, synthetic construct
  source 1..19: mol_type = other RNA
tcaaccgcacgacggacgt

SEQ ID NO: 1435 - RNA, 19 nt, synthetic construct
  source 1..19: mol_type = other RNA
caaccgcacgacggacgtg

SEQ ID NO: 1436 - RNA, 19 nt, synthetic construct
  source 1..19: mol_type = other RNA
aaccgcacgacggacgtga

SEQ ID NO: 1437 - RNA, 19 nt, synthetic construct
  source 1..19: mol_type = other RNA
accgcacgacggacgtgac

SEQ ID NO: 1438 - RNA, 19 nt, synthetic construct
  source 1..19: mol_type = other RNA
ccgcacgacggacgtgacg

SEQ ID NO: 1439 - RNA, 19 nt, synthetic construct
  source 1..19: mol_type = other RNA
cgcacgacggacgtgacgc

SEQ ID NO: 1440 - RNA, 19 nt, synthetic construct
  source 1..19: mol_type = other RNA
gcacgacggacgtgacgca

SEQ ID NO: 1441 - RNA, 19 nt, synthetic construct
  source 1..19: mol_type = other RNA
cacgacggacgtgacgcag

SEQ ID NO: 1442 - RNA, 19 nt, synthetic construct
  source 1..19: mol_type = other RNA
acgacggacgtgacgcaga

SEQ ID NO: 1443 - RNA, 19 nt, synthetic construct
  source 1..19: mol_type = other RNA
cgacggacgtgacgcagac

SEQ ID NO: 1444 - RNA, 19 nt, synthetic construct
  source 1..19: mol_type = other RNA
gacggacgtgacgcagacc

SEQ ID NO: 1445 - RNA, 19 nt, synthetic construct
  source 1..19: mol_type = other RNA
acggacgtgacgcagacct

SEQ ID NO: 1446 - RNA, 19 nt, synthetic construct
  source 1..19: mol_type = other RNA
cggacgtgacgcagacctt

SEQ ID NO: 1447 - RNA, 19 nt, synthetic construct
  source 1..19: mol_type = other RNA
ggacgtgacgcagaccttc

SEQ ID NO: 1448 - RNA, 19 nt, synthetic construct
  source 1..19: mol_type = other RNA
gacgtgacgcagaccttcg

SEQ ID NO: 1449 - RNA, 19 nt, synthetic construct
  source 1..19: mol_type = other RNA
acgtgacgcagaccttcgg

SEQ ID NO: 1450 - RNA, 19 nt, synthetic construct
  source 1..19: mol_type = other RNA
cgtgacgcagaccttcggc

SEQ ID NO: 1451 - RNA, 19 nt, synthetic construct
  source 1..19: mol_type = other RNA
gtgacgcagaccttcggca

SEQ ID NO: 1452 - RNA, 19 nt, synthetic construct
  source 1..19: mol_type = other RNA
tgacgcagaccttcggcat

SEQ ID NO: 1453 - RNA, 19 nt, synthetic construct
  source 1..19: mol_type = other RNA
gacgcagaccttcggcatc

SEQ ID NO: 1454 - RNA, 19 nt, synthetic construct
  source 1..19: mol_type = other RNA
acgcagaccttcggcatcg

SEQ ID NO: 1455 - RNA, 19 nt, synthetic construct
  source 1..19: mol_type = other RNA
cgcagaccttcggcatcga

SEQ ID NO: 1456 - RNA, 19 nt, synthetic construct
  source 1..19: mol_type = other RNA
gcagaccttcggcatcgag

SEQ ID NO: 1457 - RNA, 19 nt, synthetic construct
  source 1..19: mol_type = other RNA
cagaccttcggcatcgaga

SEQ ID NO: 1458 - RNA, 19 nt, synthetic construct
  source 1..19: mol_type = other RNA
agaccttcggcatcgagaa

SEQ ID NO: 1459 - RNA, 19 nt, synthetic construct
  source 1..19: mol_type = other RNA
gaccttcggcatcgagaag

SEQ ID NO: 1460 - RNA, 19 nt, synthetic construct
  source 1..19: mol_type = other RNA
accttcggcatcgagaagt

SEQ ID NO: 1461 - RNA, 19 nt, synthetic construct
  source 1..19: mol_type = other RNA
ccttcggcatcgagaagta

SEQ ID NO: 1462 - RNA, 19 nt, synthetic construct
  source 1..19: mol_type = other RNA
cttcggcatcgagaagtac

SEQ ID NO: 1463 - RNA, 19 nt, synthetic construct
  source 1..19: mol_type = other RNA
ttcggcatcgagaagtaca

SEQ ID NO: 1464 - RNA, 19 nt, synthetic construct
  source 1..19: mol_type = other RNA
tcggcatcgagaagtacat

SEQ ID NO: 1465 - RNA, 19 nt, synthetic construct
  source 1..19: mol_type = other RNA
cggcatcgagaagtacatc

SEQ ID NO: 1466 - RNA, 19 nt, synthetic construct
  source 1..19: mol_type = other RNA
ggcatcgagaagtacatcc

SEQ ID NO: 1467 - RNA, 19 nt, synthetic construct
  source 1..19: mol_type = other RNA
gcatcgagaagtacatccc

SEQ ID NO: 1468 - RNA, 19 nt, synthetic construct
  source 1..19: mol_type = other RNA
catcgagaagtacatcccg

SEQ ID NO: 1469 - RNA, 19 nt, synthetic construct
  source 1..19: mol_type = other RNA
atcgagaagtacatcccgt

SEQ ID NO: 1470 - RNA, 19 nt, synthetic construct
  source 1..19: mol_type = other RNA
tcgagaagtacatcccgta

SEQ ID NO: 1471 - RNA, 19 nt, synthetic construct
  source 1..19: mol_type = other RNA
cgagaagtacatcccgtac

SEQ ID NO: 1472 - RNA, 19 nt, synthetic construct
  source 1..19: mol_type = other RNA
gagaagtacatcccgtaca

SEQ ID NO: 1473 - RNA, 19 nt, synthetic construct
  source 1..19: mol_type = other RNA
agaagtacatcccgtacac

SEQ ID NO: 1474 - RNA, 19 nt, synthetic construct
  source 1..19: mol_type = other RNA
gaagtacatcccgtacacc

SEQ ID NO: 1475 - RNA, 19 nt, synthetic construct
  source 1..19: mol_type = other RNA
aagtacatcccgtacaccc

SEQ ID NO: 1476 - RNA, 19 nt, synthetic construct
  source 1..19: mol_type = other RNA
agtacatcccgtacaccct

SEQ ID NO: 1477 - RNA, 19 nt, synthetic construct
  source 1..19: mol_type = other RNA
gtacatcccgtacaccctg

SEQ ID NO: 1478 - RNA, 19 nt, synthetic construct
  source 1..19: mol_type = other RNA
tacatcccgtacaccctgt

SEQ ID NO: 1479 - RNA, 19 nt, synthetic construct
  source 1..19: mol_type = other RNA
acatcccgtacaccctgta

SEQ ID NO: 1480 - RNA, 19 nt, synthetic construct
  source 1..19: mol_type = other RNA
catcccgtacaccctgtac

SEQ ID NO: 1481 - RNA, 19 nt, synthetic construct
  source 1..19: mol_type = other RNA
atcccgtacaccctgtact

SEQ ID NO: 1482 - RNA, 19 nt, synthetic construct
  source 1..19: mol_type = other RNA
tcccgtacaccctgtactc

SEQ ID NO: 1483 - RNA, 19 nt, synthetic construct
  source 1..19: mol_type = other RNA
cccgtacaccctgtactcg

SEQ ID NO: 1484 - RNA, 19 nt, synthetic construct
  source 1..19: mol_type = other RNA
ccgtacaccctgtactcgg

SEQ ID NO: 1485 - RNA, 19 nt, synthetic construct
  source 1..19: mol_type = other RNA
cgtacaccctgtactcggt

SEQ ID NO: 1486 - RNA, 19 nt, synthetic construct
  source 1..19: mol_type = other RNA
gtacaccctgtactcggtg

SEQ ID NO: 1487 - RNA, 19 nt, synthetic construct
  source 1..19: mol_type = other RNA
tacaccctgtactcggtgt

SEQ ID NO: 1488 - RNA, 19 nt, synthetic construct
  source 1..19: mol_type = other RNA
acaccctgtactcggtgtt

SEQ ID NO: 1489 - RNA, 19 nt, synthetic construct
  source 1..19: mol_type = other RNA
caccctgtactcggtgttc

SEQ ID NO: 1490 - RNA, 19 nt, synthetic construct
  source 1..19: mol_type = other RNA
accctgtactcggtgttca

SEQ ID NO: 1491 - RNA, 19 nt, synthetic construct
  source 1..19: mol_type = other RNA
ccctgtactcggtgttcaa

SEQ ID NO: 1492 - RNA, 19 nt, synthetic construct
  source 1..19: mol_type = other RNA
cctgtactcggtgttcaac

SEQ ID NO: 1493 - RNA, 19 nt, synthetic construct
  source 1..19: mol_type = other RNA
ctgtactcggtgttcaacc

SEQ ID NO: 1494 - RNA, 19 nt, synthetic construct
  source 1..19: mol_type = other RNA
tgtactcggtgttcaaccc

SEQ ID NO: 1495 - RNA, 19 nt, synthetic construct
  source 1..19: mol_type = other RNA
gtactcggtgttcaacccc

SEQ ID NO: 1496 - RNA, 19 nt, synthetic construct
  source 1..19: mol_type = other RNA
tactcggtgttcaacccca

SEQ ID NO: 1497 - RNA, 19 nt, synthetic construct
  source 1..19: mol_type = other RNA
actcggtgttcaaccccag

SEQ ID NO: 1498 - RNA, 19 nt, synthetic construct
  source 1..19: mol_type = other RNA
ctcggtgttcaaccccagc

SEQ ID NO: 1499 - RNA, 19 nt, synthetic construct
  source 1..19: mol_type = other RNA
tcggtgttcaaccccagcg

SEQ ID NO: 1500 - RNA, 19 nt, synthetic construct
  source 1..19: mol_type = other RNA
cggtgttcaaccccagcga

SEQ ID NO: 1501 - RNA, 19 nt, synthetic construct
  source 1..19: mol_type = other RNA
ggtgttcaaccccagcgac

SEQ ID NO: 1502 - RNA, 19 nt, synthetic construct
  source 1..19: mol_type = other RNA
gtgttcaaccccagcgacc

SEQ ID NO: 1503 - RNA, 19 nt, synthetic construct
  source 1..19: mol_type = other RNA
tgttcaaccccagcgacca

SEQ ID NO: 1504 - RNA, 19 nt, synthetic construct
  source 1..19: mol_type = other RNA
gttcaaccccagcgaccac

SEQ ID NO: 1505 - RNA, 19 nt, synthetic construct
  source 1..19: mol_type = other RNA
ttcaaccccagcgaccacg

SEQ ID NO: 1506 - RNA, 19 nt, synthetic construct
  source 1..19: mol_type = other RNA
tcaaccccagcgaccacga

SEQ ID NO: 1507 - RNA, 19 nt, synthetic construct
  source 1..19: mol_type = other RNA
caaccccagcgaccacgac

SEQ ID NO: 1508 - RNA, 19 nt, synthetic construct
  source 1..19: mol_type = other RNA
aaccccagcgaccacgacc

SEQ ID NO: 1509 - RNA, 19 nt, synthetic construct
  source 1..19: mol_type = other RNA
accccagcgaccacgacct

SEQ ID NO: 1510 - RNA, 19 nt, synthetic construct
  source 1..19: mol_type = other RNA
ccccagcgaccacgacctc

SEQ ID NO: 1511 - RNA, 19 nt, synthetic construct
  source 1..19: mol_type = other RNA
cccagcgaccacgacctcg

SEQ ID NO: 1512 - RNA, 19 nt, synthetic construct
  source 1..19: mol_type = other RNA
ccagcgaccacgacctcgt

SEQ ID NO: 1513 - RNA, 19 nt, synthetic construct
  source 1..19: mol_type = other RNA
cagcgaccacgacctcgtc

SEQ ID NO: 1514 - RNA, 19 nt, synthetic construct
  source 1..19: mol_type = other RNA
agcgaccacgacctcgtcc

SEQ ID NO: 1515 - RNA, 19 nt, synthetic construct
  source 1..19: mol_type = other RNA
gcgaccacgacctcgtcct

SEQ ID NO: 1516 - RNA, 19 nt, synthetic construct
  source 1..19: mol_type = other RNA
cgaccacgacctcgtcctg

SEQ ID NO: 1517 - RNA, 19 nt, synthetic construct
  source 1..19: mol_type = other RNA
gaccacgacctcgtcctga

SEQ ID NO: 1518 - RNA, 19 nt, synthetic construct
  source 1..19: mol_type = other RNA
accacgacctcgtcctgat

SEQ ID NO: 1519 - RNA, 19 nt, synthetic construct
  source 1..19: mol_type = other RNA
ccacgacctcgtcctgatc

SEQ ID NO: 1520 - RNA, 19 nt, synthetic construct
  source 1..19: mol_type = other RNA
cacgacctcgtcctgatcc

SEQ ID NO: 1521 - RNA, 19 nt, synthetic construct
  source 1..19: mol_type = other RNA
acgacctcgtcctgatccg

SEQ ID NO: 1522 - RNA, 19 nt, synthetic construct
  source 1..19: mol_type = other RNA
cgacctcgtcctgatccgg

SEQ ID NO: 1523 - RNA, 19 nt, synthetic construct
  source 1..19: mol_type = other RNA
gacctcgtcctgatccggc

SEQ ID NO: 1524 - RNA, 19 nt, synthetic construct
  source 1..19: mol_type = other RNA
acctcgtcctgatccggct

SEQ ID NO: 1525 - RNA, 19 nt, synthetic construct
  source 1..19: mol_type = other RNA
cctcgtcctgatccggctg

SEQ ID NO: 1526 - RNA, 19 nt, synthetic construct
  source 1..19: mol_type = other RNA
ctcgtcctgatccggctga

SEQ ID NO: 1527 - RNA, 19 nt, synthetic construct
  source 1..19: mol_type = other RNA
tcgtcctgatccggctgaa

SEQ ID NO: 1528 - RNA, 19 nt, synthetic construct
  source 1..19: mol_type = other RNA
cgtcctgatccggctgaag

SEQ ID NO: 1529 - RNA, 19 nt, synthetic construct
  source 1..19: mol_type = other RNA
gtcctgatccggctgaaga

SEQ ID NO: 1530 - RNA, 19 nt, synthetic construct
  source 1..19: mol_type = other RNA
tcctgatccggctgaagaa

SEQ ID NO: 1531 - RNA, 19 nt, synthetic construct
  source 1..19: mol_type = other RNA
cctgatccggctgaagaag

SEQ ID NO: 1532 - RNA, 19 nt, synthetic construct
  source 1..19: mol_type = other RNA
ctgatccggctgaagaaga

SEQ ID NO: 1533 - RNA, 19 nt, synthetic construct
  source 1..19: mol_type = other RNA
tgatccggctgaagaagaa

SEQ ID NO: 1534 - RNA, 19 nt, synthetic construct
  source 1..19: mol_type = other RNA
gatccggctgaagaagaaa

SEQ ID NO: 1535 - RNA, 19 nt, synthetic construct
  source 1..19: mol_type = other RNA
atccggctgaagaagaaag

SEQ ID NO: 1536 - RNA, 19 nt, synthetic construct
  source 1..19: mol_type = other RNA
tccggctgaagaagaaagg

SEQ ID NO: 1537 - RNA, 19 nt, synthetic construct
  source 1..19: mol_type = other RNA
ccggctgaagaagaaaggg

SEQ ID NO: 1538 - RNA, 19 nt, synthetic construct
  source 1..19: mol_type = other RNA
cggctgaagaagaaagggg

SEQ ID NO: 1539 - RNA, 19 nt, synthetic construct
  source 1..19: mol_type = other RNA
ggctgaagaagaaagggga

SEQ ID NO: 1540 - RNA, 19 nt, synthetic construct
  source 1..19: mol_type = other RNA
gctgaagaagaaaggggac

SEQ ID NO: 1541 - RNA, 19 nt, synthetic construct
  source 1..19: mol_type = other RNA
ctgaagaagaaaggggacc

SEQ ID NO: 1542 - RNA, 19 nt, synthetic construct
  source 1..19: mol_type = other RNA
tgaagaagaaaggggaccg

SEQ ID NO: 1543 - RNA, 19 nt, synthetic construct
  source 1..19: mol_type = other RNA
gaagaagaaaggggaccgc

SEQ ID NO: 1544 - RNA, 19 nt, synthetic construct
  source 1..19: mol_type = other RNA
aagaagaaaggggaccgct

SEQ ID NO: 1545 - RNA, 19 nt, synthetic construct
  source 1..19: mol_type = other RNA
agaagaaaggggaccgctg

SEQ ID NO: 1546 - RNA, 19 nt, synthetic construct
  source 1..19: mol_type = other RNA
gaagaaaggggaccgctgt

SEQ ID NO: 1547 - RNA, 19 nt, synthetic construct
  source 1..19: mol_type = other RNA
aagaaaggggaccgctgtg

SEQ ID NO: 1548 - RNA, 19 nt, synthetic construct
  source 1..19: mol_type = other RNA
agaaaggggaccgctgtgc

SEQ ID NO: 1549 - RNA, 19 nt, synthetic construct
  source 1..19: mol_type = other RNA
gaaaggggaccgctgtgcc

SEQ ID NO: 1550 - RNA, 19 nt, synthetic construct
  source 1..19: mol_type = other RNA
aaaggggaccgctgtgcca

SEQ ID NO: 1551 - RNA, 19 nt, synthetic construct
  source 1..19: mol_type = other RNA
aaggggaccgctgtgccac

SEQ ID NO: 1552 - RNA, 19 nt, synthetic construct
  source 1..19: mol_type = other RNA
aggggaccgctgtgccaca

SEQ ID NO: 1553 - RNA, 19 nt, synthetic construct
  source 1..19: mol_type = other RNA
ggggaccgctgtgccacac

SEQ ID NO: 1554 - RNA, 19 nt, synthetic construct
  source 1..19: mol_type = other RNA
gggaccgctgtgccacacg

SEQ ID NO: 1555 - RNA, 19 nt, synthetic construct
  source 1..19: mol_type = other RNA
ggaccgctgtgccacacgc

SEQ ID NO: 1556 - RNA, 19 nt, synthetic construct
  source 1..19: mol_type = other RNA
gaccgctgtgccacacgct

SEQ ID NO: 1557 - RNA, 19 nt, synthetic construct
  source 1..19: mol_type = other RNA
accgctgtgccacacgctc

SEQ ID NO: 1558 - protein, 19 aa, synthetic construct
CCGCTGTGCCACACGCTCG

SEQ ID NO: 1559 - RNA, 19 nt, synthetic construct
  source 1..19: mol_type = other RNA
cgctgtgccacacgctcgc

SEQ ID NO: 1560 - RNA, 19 nt, synthetic construct
  source 1..19: mol_type = other RNA
gctgtgccacacgctcgca

SEQ ID NO: 1561 - RNA, 19 nt, synthetic construct
  source 1..19: mol_type = other RNA
ctgtgccacacgctcgcag

SEQ ID NO: 1562 - RNA, 19 nt, synthetic construct
  source 1..19: mol_type = other RNA
tgtgccacacgctcgcagt

SEQ ID NO: 1563 - RNA, 19 nt, synthetic construct
  source 1..19: mol_type = other RNA
gtgccacacgctcgcagtt

SEQ ID NO: 1564 - RNA, 19 nt, synthetic construct
  source 1..19: mol_type = other RNA
tgccacacgctcgcagttc

SEQ ID NO: 1565 - RNA, 19 nt, synthetic construct
  source 1..19: mol_type = other RNA
gccacacgctcgcagttcg

SEQ ID NO: 1566 - RNA, 19 nt, synthetic construct
  source 1..19: mol_type = other RNA
ccacacgctcgcagttcgt

SEQ ID NO: 1567 - RNA, 19 nt, synthetic construct
  source 1..19: mol_type = other RNA
cacacgctcgcagttcgtg

SEQ ID NO: 1568 - RNA, 19 nt, synthetic construct
  source 1..19: mol_type = other RNA
acacgctcgcagttcgtgc

SEQ ID NO: 1569 - RNA, 19 nt, synthetic construct
  source 1..19: mol_type = other RNA
cacgctcgcagttcgtgca

SEQ ID NO: 1570 - RNA, 19 nt, synthetic construct
  source 1..19: mol_type = other RNA
acgctcgcagttcgtgcag

SEQ ID NO: 1571 - RNA, 19 nt, synthetic construct
  source 1..19: mol_type = other RNA
cgctcgcagttcgtgcagc

SEQ ID NO: 1572 - RNA, 19 nt, synthetic construct
  source 1..19: mol_type = other RNA
gctcgcagttcgtgcagcc

SEQ ID NO: 1573 - RNA, 19 nt, synthetic construct
  source 1..19: mol_type = other RNA
ctcgcagttcgtgcagccc

SEQ ID NO: 1574 - RNA, 19 nt, synthetic construct
  source 1..19: mol_type = other RNA
tcgcagttcgtgcagccca

SEQ ID NO: 1575 - RNA, 19 nt, synthetic construct
  source 1..19: mol_type = other RNA
cgcagttcgtgcagcccat

SEQ ID NO: 1576 - RNA, 19 nt, synthetic construct
  source 1..19: mol_type = other RNA
gcagttcgtgcagcccatc

SEQ ID NO: 1577 - RNA, 19 nt, synthetic construct
  source 1..19: mol_type = other RNA
cagttcgtgcagcccatct

SEQ ID NO: 1578 - RNA, 19 nt, synthetic construct
  source 1..19: mol_type = other RNA
agttcgtgcagcccatctg

SEQ ID NO: 1579 - RNA, 19 nt, synthetic construct
  source 1..19: mol_type = other RNA
gttcgtgcagcccatctgc

SEQ ID NO: 1580 - RNA, 19 nt, synthetic construct
  source 1..19: mol_type = other RNA
ttcgtgcagcccatctgcc

SEQ ID NO: 1581 - RNA, 19 nt, synthetic construct
  source 1..19: mol_type = other RNA
tcgtgcagcccatctgcct

SEQ ID NO: 1582 - RNA, 19 nt, synthetic construct
  source 1..19: mol_type = other RNA
cgtgcagcccatctgcctg

SEQ ID NO: 1583 - RNA, 19 nt, synthetic construct
  source 1..19: mol_type = other RNA
gtgcagcccatctgcctgc

SEQ ID NO: 1584 - RNA, 19 nt, synthetic construct
  source 1..19: mol_type = other RNA
tgcagcccatctgcctgcc

SEQ ID NO: 1585 - RNA, 19 nt, synthetic construct
  source 1..19: mol_type = other RNA
gcagcccatctgcctgccc

SEQ ID NO: 1586 - RNA, 19 nt, synthetic construct
  source 1..19: mol_type = other RNA
cagcccatctgcctgcccg

SEQ ID NO: 1587 - RNA, 19 nt, synthetic construct
  source 1..19: mol_type = other RNA
agcccatctgcctgcccga

SEQ ID NO: 1588 - RNA, 19 nt, synthetic construct
  source 1..19: mol_type = other RNA
gcccatctgcctgcccgag

SEQ ID NO: 1589 - RNA, 19 nt, synthetic construct
  source 1..19: mol_type = other RNA
cccatctgcctgcccgagc

SEQ ID NO: 1590 - RNA, 19 nt, synthetic construct
  source 1..19: mol_type = other RNA
ccatctgcctgcccgagcc

SEQ ID NO: 1591 - RNA, 19 nt, synthetic construct
  source 1..19: mol_type = other RNA
catctgcctgcccgagccc

SEQ ID NO: 1592 - RNA, 19 nt, synthetic construct
  source 1..19: mol_type = other RNA
atctgcctgcccgagcccg

SEQ ID NO: 1593 - RNA, 19 nt, synthetic construct
  source 1..19: mol_type = other RNA
tctgcctgcccgagcccgg

SEQ ID NO: 1594 - RNA, 19 nt, synthetic construct
  source 1..19: mol_type = other RNA
ctgcctgcccgagcccggc

SEQ ID NO: 1595 - RNA, 19 nt, synthetic construct
  source 1..19: mol_type = other RNA
tgcctgcccgagcccggca

SEQ ID NO: 1596 - RNA, 19 nt, synthetic construct
  source 1..19: mol_type = other RNA
gcctgcccgagcccggcag

SEQ ID NO: 1597 - RNA, 19 nt, synthetic construct
  source 1..19: mol_type = other RNA
cctgcccgagcccggcagc

SEQ ID NO: 1598 - RNA, 19 nt, synthetic construct
  source 1..19: mol_type = other RNA
ctgcccgagcccggcagca

SEQ ID NO: 1599 - RNA, 19 nt, synthetic construct
  source 1..19: mol_type = other RNA
tgcccgagcccggcagcac

SEQ ID NO: 1600 - RNA, 19 nt, synthetic construct
  source 1..19: mol_type = other RNA
gcccgagcccggcagcacc

SEQ ID NO: 1601 - RNA, 19 nt, synthetic construct
  source 1..19: mol_type = other RNA
cccgagcccggcagcacct

SEQ ID NO: 1602 - RNA, 19 nt, synthetic construct
  source 1..19: mol_type = other RNA
ccgagcccggcagcacctt

SEQ ID NO: 1603 - RNA, 19 nt, synthetic construct
  source 1..19: mol_type = other RNA
cgagcccggcagcaccttc

SEQ ID NO: 1604 - RNA, 19 nt, synthetic construct
  source 1..19: mol_type = other RNA
gagcccggcagcaccttcc

SEQ ID NO: 1605 - RNA, 19 nt, synthetic construct
  source 1..19: mol_type = other RNA
agcccggcagcaccttccc

SEQ ID NO: 1606 - RNA, 19 nt, synthetic construct
  source 1..19: mol_type = other RNA
gcccggcagcaccttcccc

SEQ ID NO: 1607 - RNA, 19 nt, synthetic construct
  source 1..19: mol_type = other RNA
cccggcagcaccttccccg

SEQ ID NO: 1608 - RNA, 19 nt, synthetic construct
  source 1..19: mol_type = other RNA
ccggcagcaccttccccgc

SEQ ID NO: 1609 - RNA, 19 nt, synthetic construct
  source 1..19: mol_type = other RNA
cggcagcaccttccccgca

SEQ ID NO: 1610 - RNA, 19 nt, synthetic construct
  source 1..19: mol_type = other RNA
ggcagcaccttccccgcag

SEQ ID NO: 1611 - RNA, 19 nt, synthetic construct
  source 1..19: mol_type = other RNA
gcagcaccttccccgcagg

SEQ ID NO: 1612 - RNA, 19 nt, synthetic construct
  source 1..19: mol_type = other RNA
cagcaccttccccgcagga

SEQ ID NO: 1613 - RNA, 19 nt, synthetic construct
  source 1..19: mol_type = other RNA
agcaccttccccgcaggac

SEQ ID NO: 1614 - RNA, 19 nt, synthetic construct
  source 1..19: mol_type = other RNA
gcaccttccccgcaggaca

SEQ ID NO: 1615 - RNA, 19 nt, synthetic construct
  source 1..19: mol_type = other RNA
caccttccccgcaggacac

SEQ ID NO: 1616 - RNA, 19 nt, synthetic construct
  source 1..19: mol_type = other RNA
accttccccgcaggacaca

SEQ ID NO: 1617 - RNA, 19 nt, synthetic construct
  source 1..19: mol_type = other RNA
ccttccccgcaggacacaa

SEQ ID NO: 1618 - RNA, 19 nt, synthetic construct
  source 1..19: mol_type = other RNA
cttccccgcaggacacaag

SEQ ID NO: 1619 - RNA, 19 nt, synthetic construct
  source 1..19: mol_type = other RNA
ttccccgcaggacacaagt

SEQ ID NO: 1620 - RNA, 19 nt, synthetic construct
  source 1..19: mol_type = other RNA
tccccgcaggacacaagtg

SEQ ID NO: 1621 - RNA, 19 nt, synthetic construct
  source 1..19: mol_type = other RNA
ccccgcaggacacaagtgc

SEQ ID NO: 1622 - RNA, 19 nt, synthetic construct
  source 1..19: mol_type = other RNA
cccgcaggacacaagtgcc

SEQ ID NO: 1623 - RNA, 19 nt, synthetic construct
  source 1..19: mol_type = other RNA
ccgcaggacacaagtgcca

SEQ ID NO: 1624 - RNA, 19 nt, synthetic construct
  source 1..19: mol_type = other RNA
cgcaggacacaagtgccag

SEQ ID NO: 1625 - RNA, 19 nt, synthetic construct
  source 1..19: mol_type = other RNA
gcaggacacaagtgccaga

SEQ ID NO: 1626 - RNA, 19 nt, synthetic construct
  source 1..19: mol_type = other RNA
caggacacaagtgccagat

SEQ ID NO: 1627 - RNA, 19 nt, synthetic construct
  source 1..19: mol_type = other RNA
aggacacaagtgccagatt

SEQ ID NO: 1628 - RNA, 19 nt, synthetic construct
  source 1..19: mol_type = other RNA
ggacacaagtgccagattg

SEQ ID NO: 1629 - RNA, 19 nt, synthetic construct
  source 1..19: mol_type = other RNA
gacacaagtgccagattgc

SEQ ID NO: 1630 - RNA, 19 nt, synthetic construct
  source 1..19: mol_type = other RNA
acacaagtgccagattgcg

SEQ ID NO: 1631 - RNA, 19 nt, synthetic construct
  source 1..19: mol_type = other RNA
cacaagtgccagattgcgg

SEQ ID NO: 1632 - RNA, 19 nt, synthetic construct
  source 1..19: mol_type = other RNA
acaagtgccagattgcggg

SEQ ID NO: 1633 - RNA, 19 nt, synthetic construct
  source 1..19: mol_type = other RNA
caagtgccagattgcgggc

SEQ ID NO: 1634 - RNA, 19 nt, synthetic construct
  source 1..19: mol_type = other RNA
aagtgccagattgcgggct

SEQ ID NO: 1635 - RNA, 19 nt, synthetic construct
  source 1..19: mol_type = other RNA
agtgccagattgcgggctg

SEQ ID NO: 1636 - RNA, 19 nt, synthetic construct
  source 1..19: mol_type = other RNA
gtgccagattgcgggctgg

SEQ ID NO: 1637 - RNA, 19 nt, synthetic construct
  source 1..19: mol_type = other RNA
tgccagattgcgggctggg

SEQ ID NO: 1638 - RNA, 19 nt, synthetic construct
  source 1..19: mol_type = other RNA
gccagattgcgggctgggg

SEQ ID NO: 1639 - RNA, 19 nt, synthetic construct
  source 1..19: mol_type = other RNA
ccagattgcgggctggggc

SEQ ID NO: 1640 - RNA, 19 nt, synthetic construct
  source 1..19: mol_type = other RNA
cagattgcgggctggggcc

SEQ ID NO: 1641 - RNA, 19 nt, synthetic construct
  source 1..19: mol_type = other RNA
agattgcgggctggggcca

SEQ ID NO: 1642 - RNA, 19 nt, synthetic construct
  source 1..19: mol_type = other RNA
gattgcgggctggggccac

SEQ ID NO: 1643 - RNA, 19 nt, synthetic construct
  source 1..19: mol_type = other RNA
attgcgggctggggccact

SEQ ID NO: 1644 - RNA, 19 nt, synthetic construct
  source 1..19: mol_type = other RNA
ttgcgggctggggccactt

SEQ ID NO: 1645 - RNA, 19 nt, synthetic construct
  source 1..19: mol_type = other RNA
tgcgggctggggccacttg

SEQ ID NO: 1646 - RNA, 19 nt, synthetic construct
  source 1..19: mol_type = other RNA
gcgggctggggccacttgg

SEQ ID NO: 1647 - RNA, 19 nt, synthetic construct
  source 1..19: mol_type = other RNA
cgggctggggccacttgga

SEQ ID NO: 1648 - RNA, 19 nt, synthetic construct
  source 1..19: mol_type = other RNA
gggctggggccacttggat

SEQ ID NO: 1649 - RNA, 19 nt, synthetic construct
  source 1..19: mol_type = other RNA
ggctggggccacttggatg

SEQ ID NO: 1650 - RNA, 19 nt, synthetic construct
  source 1..19: mol_type = other RNA
gctggggccacttggatga

SEQ ID NO: 1651 - RNA, 19 nt, synthetic construct
  source 1..19: mol_type = other RNA
ctggggccacttggatgag

SEQ ID NO: 1652 - RNA, 19 nt, synthetic construct
  source 1..19: mol_type = other RNA
tggggccacttggatgaga

SEQ ID NO: 1653 - RNA, 19 nt, synthetic construct
  source 1..19: mol_type = other RNA
ggggccacttggatgagaa

SEQ ID NO: 1654 - RNA, 19 nt, synthetic construct
  source 1..19: mol_type = other RNA
gggccacttggatgagaac

SEQ ID NO: 1655 - RNA, 19 nt, synthetic construct
  source 1..19: mol_type = other RNA
ggccacttggatgagaacg

SEQ ID NO: 1656 - RNA, 19 nt, synthetic construct
  source 1..19: mol_type = other RNA
gccacttggatgagaacgt

SEQ ID NO: 1657 - RNA, 19 nt, synthetic construct
  source 1..19: mol_type = other RNA
ccacttggatgagaacgtg

SEQ ID NO: 1658 - RNA, 19 nt, synthetic construct
  source 1..19: mol_type = other RNA
cacttggatgagaacgtga

SEQ ID NO: 1659 - RNA, 19 nt, synthetic construct
  source 1..19: mol_type = other RNA
acttggatgagaacgtgag

SEQ ID NO: 1660 - RNA, 19 nt, synthetic construct
  source 1..19: mol_type = other RNA
cttggatgagaacgtgagc

SEQ ID NO: 1661 - RNA, 19 nt, synthetic construct
  source 1..19: mol_type = other RNA
ttggatgagaacgtgagcg

SEQ ID NO: 1662 - RNA, 19 nt, synthetic construct
  source 1..19: mol_type = other RNA
tggatgagaacgtgagcgg

SEQ ID NO: 1663 - RNA, 19 nt, synthetic construct
  source 1..19: mol_type = other RNA
ggatgagaacgtgagcggc

SEQ ID NO: 1664 - RNA, 19 nt, synthetic construct
  source 1..19: mol_type = other RNA
gatgagaacgtgagcggct

SEQ ID NO: 1665 - RNA, 19 nt, synthetic construct
  source 1..19: mol_type = other RNA
atgagaacgtgagcggcta

SEQ ID NO: 1666 - RNA, 19 nt, synthetic construct
  source 1..19: mol_type = other RNA
tgagaacgtgagcggctac

SEQ ID NO: 1667 - RNA, 19 nt, synthetic construct
  source 1..19: mol_type = other RNA
gagaacgtgagcggctact

SEQ ID NO: 1668 - RNA, 19 nt, synthetic construct
  source 1..19: mol_type = other RNA
agaacgtgagcggctactc

SEQ ID NO: 1669 - RNA, 19 nt, synthetic construct
  source 1..19: mol_type = other RNA
gaacgtgagcggctactcc

SEQ ID NO: 1670 - RNA, 19 nt, synthetic construct
  source 1..19: mol_type = other RNA
aacgtgagcggctactcca

SEQ ID NO: 1671 - RNA, 19 nt, synthetic construct
  source 1..19: mol_type = other RNA
acgtgagcggctactccag

SEQ ID NO: 1672 - RNA, 19 nt, synthetic construct
  source 1..19: mol_type = other RNA
cgtgagcggctactccagc

SEQ ID NO: 1673 - RNA, 19 nt, synthetic construct
  source 1..19: mol_type = other RNA
gtgagcggctactccagct

SEQ ID NO: 1674 - RNA, 19 nt, synthetic construct
  source 1..19: mol_type = other RNA
tgagcggctactccagctc

SEQ ID NO: 1675 - RNA, 19 nt, synthetic construct
  source 1..19: mol_type = other RNA
gagcggctactccagctcc

SEQ ID NO: 1676 - RNA, 19 nt, synthetic construct
  source 1..19: mol_type = other RNA
agcggctactccagctccc

SEQ ID NO: 1677 - RNA, 19 nt, synthetic construct
  source 1..19: mol_type = other RNA
gcggctactccagctccct

SEQ ID NO: 1678 - RNA, 19 nt, synthetic construct
  source 1..19: mol_type = other RNA
cggctactccagctccctg

SEQ ID NO: 1679 - RNA, 19 nt, synthetic construct
  source 1..19: mol_type = other RNA
ggctactccagctccctgc

SEQ ID NO: 1680 - RNA, 19 nt, synthetic construct
  source 1..19: mol_type = other RNA
gctactccagctccctgcg

SEQ ID NO: 1681 - RNA, 19 nt, synthetic construct
  source 1..19: mol_type = other RNA
ctactccagctccctgcgg

SEQ ID NO: 1682 - RNA, 19 nt, synthetic construct
  source 1..19: mol_type = other RNA
tactccagctccctgcggg

SEQ ID NO: 1683 - RNA, 19 nt, synthetic construct
  source 1..19: mol_type = other RNA
actccagctccctgcggga

SEQ ID NO: 1684 - RNA, 19 nt, synthetic construct
  source 1..19: mol_type = other RNA
ctccagctccctgcgggag

SEQ ID NO: 1685 - RNA, 19 nt, synthetic construct
  source 1..19: mol_type = other RNA
tccagctccctgcgggagg

SEQ ID NO: 1686 - RNA, 19 nt, synthetic construct
  source 1..19: mol_type = other RNA
ccagctccctgcgggaggc

SEQ ID NO: 1687 - RNA, 19 nt, synthetic construct
  source 1..19: mol_type = other RNA
cagctccctgcgggaggcc

SEQ ID NO: 1688 - RNA, 19 nt, synthetic construct
  source 1..19: mol_type = other RNA
agctccctgcgggaggccc

SEQ ID NO: 1689 - RNA, 19 nt, synthetic construct
  source 1..19: mol_type = other RNA
gctccctgcgggaggccct

SEQ ID NO: 1690 - RNA, 19 nt, synthetic construct
  source 1..19: mol_type = other RNA
ctccctgcgggaggccctg

SEQ ID NO: 1691 - RNA, 19 nt, synthetic construct
  source 1..19: mol_type = other RNA
tccctgcgggaggccctgg

SEQ ID NO: 1692 - RNA, 19 nt, synthetic construct
  source 1..19: mol_type = other RNA
ccctgcgggaggccctggt

SEQ ID NO: 1693 - RNA, 19 nt, synthetic construct
  source 1..19: mol_type = other RNA
cctgcgggaggccctggtc

SEQ ID NO: 1694 - RNA, 19 nt, synthetic construct
  source 1..19: mol_type = other RNA
ctgcgggaggccctggtcc

SEQ ID NO: 1695 - RNA, 19 nt, synthetic construct
  source 1..19: mol_type = other RNA
tgcgggaggccctggtccc

SEQ ID NO: 1696 - RNA, 19 nt, synthetic construct
  source 1..19: mol_type = other RNA
gcgggaggccctggtcccc

SEQ ID NO: 1697 - RNA, 19 nt, synthetic construct
  source 1..19: mol_type = other RNA
cgggaggccctggtccccc

SEQ ID NO: 1698 - RNA, 19 nt, synthetic construct
  source 1..19: mol_type = other RNA
gggaggccctggtccccct

SEQ ID NO: 1699 - RNA, 19 nt, synthetic construct
  source 1..19: mol_type = other RNA
ggaggccctggtccccctg

SEQ ID NO: 1700 - RNA, 19 nt, synthetic construct
  source 1..19: mol_type = other RNA
gaggccctggtccccctgg

SEQ ID NO: 1701 - RNA, 19 nt, synthetic construct
  source 1..19: mol_type = other RNA
aggccctggtccccctggt

SEQ ID NO: 1702 - RNA, 19 nt, synthetic construct
  source 1..19: mol_type = other RNA
ggccctggtccccctggtc

SEQ ID NO: 1703 - RNA, 19 nt, synthetic construct
  source 1..19: mol_type = other RNA
gccctggtccccctggtcg

SEQ ID NO: 1704 - RNA, 19 nt, synthetic construct
  source 1..19: mol_type = other RNA
ccctggtccccctggtcgc

SEQ ID NO: 1705 - RNA, 19 nt, synthetic construct
  source 1..19: mol_type = other RNA
cctggtccccctggtcgcc

SEQ ID NO: 1706 - RNA, 19 nt, synthetic construct
  source 1..19: mol_type = other RNA
ctggtccccctggtcgccg

SEQ ID NO: 1707 - RNA, 19 nt, synthetic construct
  source 1..19: mol_type = other RNA
tggtccccctggtcgccga

SEQ ID NO: 1708 - RNA, 19 nt, synthetic construct
  source 1..19: mol_type = other RNA
ggtccccctggtcgccgac

SEQ ID NO: 1709 - RNA, 19 nt, synthetic construct
  source 1..19: mol_type = other RNA
gtccccctggtcgccgacc

SEQ ID NO: 1710 - RNA, 19 nt, synthetic construct
  source 1..19: mol_type = other RNA
tccccctggtcgccgacca

SEQ ID NO: 1711 - RNA, 19 nt, synthetic construct
  source 1..19: mol_type = other RNA
ccccctggtcgccgaccac

SEQ ID NO: 1712 - RNA, 19 nt, synthetic construct
  source 1..19: mol_type = other RNA
cccctggtcgccgaccaca

SEQ ID NO: 1713 - RNA, 19 nt, synthetic construct
  source 1..19: mol_type = other RNA
ccctggtcgccgaccacaa

SEQ ID NO: 1714 - RNA, 19 nt, synthetic construct
  source 1..19: mol_type = other RNA
cctggtcgccgaccacaag

SEQ ID NO: 1715 - RNA, 19 nt, synthetic construct
  source 1..19: mol_type = other RNA
ctggtcgccgaccacaagt

SEQ ID NO: 1716 - RNA, 19 nt, synthetic construct
  source 1..19: mol_type = other RNA
tggtcgccgaccacaagtg

SEQ ID NO: 1717 - RNA, 19 nt, synthetic construct
  source 1..19: mol_type = other RNA
ggtcgccgaccacaagtgc

SEQ ID NO: 1718 - RNA, 19 nt, synthetic construct
  source 1..19: mol_type = other RNA
gtcgccgaccacaagtgca

SEQ ID NO: 1719 - RNA, 19 nt, synthetic construct
  source 1..19: mol_type = other RNA
tcgccgaccacaagtgcag

SEQ ID NO: 1720 - RNA, 19 nt, synthetic construct
  source 1..19: mol_type = other RNA
cgccgaccacaagtgcagc

SEQ ID NO: 1721 - RNA, 19 nt, synthetic construct
  source 1..19: mol_type = other RNA
gccgaccacaagtgcagca

SEQ ID NO: 1722 - RNA, 19 nt, synthetic construct
  source 1..19: mol_type = other RNA
ccgaccacaagtgcagcag

SEQ ID NO: 1723 - RNA, 19 nt, synthetic construct
  source 1..19: mol_type = other RNA
cgaccacaagtgcagcagc

SEQ ID NO: 1724 - RNA, 19 nt, synthetic construct
  source 1..19: mol_type = other RNA
gaccacaagtgcagcagcc

SEQ ID NO: 1725 - RNA, 19 nt, synthetic construct
  source 1..19: mol_type = other RNA
accacaagtgcagcagccc

SEQ ID NO: 1726 - RNA, 19 nt, synthetic construct
  source 1..19: mol_type = other RNA
ccacaagtgcagcagccct

SEQ ID NO: 1727 - RNA, 19 nt, synthetic construct
  source 1..19: mol_type = other RNA
cacaagtgcagcagccctg

SEQ ID NO: 1728 - RNA, 19 nt, synthetic construct
  source 1..19: mol_type = other RNA
acaagtgcagcagccctga

SEQ ID NO: 1729 - RNA, 19 nt, synthetic construct
  source 1..19: mol_type = other RNA
caagtgcagcagccctgag

SEQ ID NO: 1730 - RNA, 19 nt, synthetic construct
  source 1..19: mol_type = other RNA
aagtgcagcagccctgagg

SEQ ID NO: 1731 - RNA, 19 nt, synthetic construct
  source 1..19: mol_type = other RNA
agtgcagcagccctgaggt

SEQ ID NO: 1732 - RNA, 19 nt, synthetic construct
  source 1..19: mol_type = other RNA
gtgcagcagccctgaggtc

SEQ ID NO: 1733 - RNA, 19 nt, synthetic construct
  source 1..19: mol_type = other RNA
tgcagcagccctgaggtct

SEQ ID NO: 1734 - RNA, 19 nt, synthetic construct
  source 1..19: mol_type = other RNA
gcagcagccctgaggtcta

SEQ ID NO: 1735 - RNA, 19 nt, synthetic construct
  source 1..19: mol_type = other RNA
cagcagccctgaggtctac

SEQ ID NO: 1736 - RNA, 19 nt, synthetic construct
  source 1..19: mol_type = other RNA
agcagccctgaggtctacg

SEQ ID NO: 1737 - RNA, 19 nt, synthetic construct
  source 1..19: mol_type = other RNA
gcagccctgaggtctacgg

SEQ ID NO: 1738 - RNA, 19 nt, synthetic construct
  source 1..19: mol_type = other RNA
cagccctgaggtctacggc

SEQ ID NO: 1739 - RNA, 19 nt, synthetic construct
  source 1..19: mol_type = other RNA
agccctgaggtctacggcg

SEQ ID NO: 1740 - RNA, 19 nt, synthetic construct
  source 1..19: mol_type = other RNA
gccctgaggtctacggcgc

SEQ ID NO: 1741 - RNA, 19 nt, synthetic construct
  source 1..19: mol_type = other RNA
ccctgaggtctacggcgcc

SEQ ID NO: 1742 - RNA, 19 nt, synthetic construct
  source 1..19: mol_type = other RNA
cctgaggtctacggcgccg

SEQ ID NO: 1743 - RNA, 19 nt, synthetic construct
  source 1..19: mol_type = other RNA
ctgaggtctacggcgccga

SEQ ID NO: 1744 - RNA, 19 nt, synthetic construct
  source 1..19: mol_type = other RNA
tgaggtctacggcgccgac

SEQ ID NO: 1745 - RNA, 19 nt, synthetic construct
  source 1..19: mol_type = other RNA
gaggtctacggcgccgaca

SEQ ID NO: 1746 - RNA, 19 nt, synthetic construct
  source 1..19: mol_type = other RNA
aggtctacggcgccgacat

SEQ ID NO: 1747 - RNA, 19 nt, synthetic construct
  source 1..19: mol_type = other RNA
ggtctacggcgccgacatc

SEQ ID NO: 1748 - RNA, 19 nt, synthetic construct
  source 1..19: mol_type = other RNA
gtctacggcgccgacatca

SEQ ID NO: 1749 - RNA, 19 nt, synthetic construct
  source 1..19: mol_type = other RNA
tctacggcgccgacatcag

SEQ ID NO: 1750 - RNA, 19 nt, synthetic construct
  source 1..19: mol_type = other RNA
ctacggcgccgacatcagc

SEQ ID NO: 1751 - RNA, 19 nt, synthetic construct
  source 1..19: mol_type = other RNA
tacggcgccgacatcagcc

SEQ ID NO: 1752 - RNA, 19 nt, synthetic construct
  source 1..19: mol_type = other RNA
acggcgccgacatcagccc

SEQ ID NO: 1753 - RNA, 19 nt, synthetic construct
  source 1..19: mol_type = other RNA
cggcgccgacatcagcccc

SEQ ID NO: 1754 - RNA, 19 nt, synthetic construct
  source 1..19: mol_type = other RNA
ggcgccgacatcagcccca

SEQ ID NO: 1755 - RNA, 19 nt, synthetic construct
  source 1..19: mol_type = other RNA
gcgccgacatcagccccaa

SEQ ID NO: 1756 - RNA, 19 nt, synthetic construct
  source 1..19: mol_type = other RNA
cgccgacatcagccccaac

SEQ ID NO: 1757 - RNA, 19 nt, synthetic construct
  source 1..19: mol_type = other RNA
gccgacatcagccccaaca

SEQ ID NO: 1758 - RNA, 19 nt, synthetic construct
  source 1..19: mol_type = other RNA
ccgacatcagccccaacat

SEQ ID NO: 1759 - RNA, 19 nt, synthetic construct
  source 1..19: mol_type = other RNA
cgacatcagccccaacatg

SEQ ID NO: 1760 - RNA, 19 nt, synthetic construct
  source 1..19: mol_type = other RNA
gacatcagccccaacatgc

SEQ ID NO: 1761 - RNA, 19 nt, synthetic construct
  source 1..19: mol_type = other RNA
acatcagccccaacatgct

SEQ ID NO: 1762 - RNA, 19 nt, synthetic construct
  source 1..19: mol_type = other RNA
catcagccccaacatgctc

SEQ ID NO: 1763 - RNA, 19 nt, synthetic construct
  source 1..19: mol_type = other RNA
atcagccccaacatgctct

SEQ ID NO: 1764 - RNA, 19 nt, synthetic construct
  source 1..19: mol_type = other RNA
tcagccccaacatgctctg

SEQ ID NO: 1765 - RNA, 19 nt, synthetic construct
  source 1..19: mol_type = other RNA
cagccccaacatgctctgt

SEQ ID NO: 1766 - RNA, 19 nt, synthetic construct
  source 1..19: mol_type = other RNA
agccccaacatgctctgtg

SEQ ID NO: 1767 - RNA, 19 nt, synthetic construct
  source 1..19: mol_type = other RNA
gccccaacatgctctgtgc

SEQ ID NO: 1768 - RNA, 19 nt, synthetic construct
  source 1..19: mol_type = other RNA
ccccaacatgctctgtgcc

SEQ ID NO: 1769 - RNA, 19 nt, synthetic construct
  source 1..19: mol_type = other RNA
cccaacatgctctgtgccg

SEQ ID NO: 1770 - RNA, 19 nt, synthetic construct
  source 1..19: mol_type = other RNA
ccaacatgctctgtgccgg

SEQ ID NO: 1771 - RNA, 19 nt, synthetic construct
  source 1..19: mol_type = other RNA
caacatgctctgtgccggc

SEQ ID NO: 1772 - RNA, 19 nt, synthetic construct
  source 1..19: mol_type = other RNA
aacatgctctgtgccggct

SEQ ID NO: 1773 - RNA, 19 nt, synthetic construct
  source 1..19: mol_type = other RNA
acatgctctgtgccggcta

SEQ ID NO: 1774 - RNA, 19 nt, synthetic construct
  source 1..19: mol_type = other RNA
catgctctgtgccggctac

SEQ ID NO: 1775 - RNA, 19 nt, synthetic construct
  source 1..19: mol_type = other RNA
atgctctgtgccggctact

SEQ ID NO: 1776 - RNA, 19 nt, synthetic construct
  source 1..19: mol_type = other RNA
tgctctgtgccggctactt

SEQ ID NO: 1777 - RNA, 19 nt, synthetic construct
  source 1..19: mol_type = other RNA
gctctgtgccggctacttc

SEQ ID NO: 1778 - RNA, 19 nt, synthetic construct
  source 1..19: mol_type = other RNA
ctctgtgccggctacttcg

SEQ ID NO: 1779 - RNA, 19 nt, synthetic construct
  source 1..19: mol_type = other RNA
tctgtgccggctacttcga

SEQ ID NO: 1780 - RNA, 19 nt, synthetic construct
  source 1..19: mol_type = other RNA
ctgtgccggctacttcgac

SEQ ID NO: 1781 - RNA, 19 nt, synthetic construct
  source 1..19: mol_type = other RNA
tgtgccggctacttcgact

SEQ ID NO: 1782 - RNA, 19 nt, synthetic construct
  source 1..19: mol_type = other RNA
gtgccggctacttcgactg

SEQ ID NO: 1783 - RNA, 19 nt, synthetic construct
  source 1..19: mol_type = other RNA
tgccggctacttcgactgc

SEQ ID NO: 1784 - RNA, 19 nt, synthetic construct
  source 1..19: mol_type = other RNA
gccggctacttcgactgca

SEQ ID NO: 1785 - RNA, 19 nt, synthetic construct
  source 1..19: mol_type = other RNA
ccggctacttcgactgcaa

SEQ ID NO: 1786 - RNA, 19 nt, synthetic construct
  source 1..19: mol_type = other RNA
cggctacttcgactgcaag

SEQ ID NO: 1787 - RNA, 19 nt, synthetic construct
  source 1..19: mol_type = other RNA
ggctacttcgactgcaagt

SEQ ID NO: 1788 - RNA, 19 nt, synthetic construct
  source 1..19: mol_type = other RNA
gctacttcgactgcaagtc

SEQ ID NO: 1789 - RNA, 19 nt, synthetic construct
  source 1..19: mol_type = other RNA
ctacttcgactgcaagtcc

SEQ ID NO: 1790 - RNA, 19 nt, synthetic construct
  source 1..19: mol_type = other RNA
tacttcgactgcaagtccg

SEQ ID NO: 1791 - RNA, 19 nt, synthetic construct
  source 1..19: mol_type = other RNA
acttcgactgcaagtccga

SEQ ID NO: 1792 - RNA, 19 nt, synthetic construct
  source 1..19: mol_type = other RNA
cttcgactgcaagtccgac

SEQ ID NO: 1793 - RNA, 19 nt, synthetic construct
  source 1..19: mol_type = other RNA
ttcgactgcaagtccgacg

SEQ ID NO: 1794 - RNA, 19 nt, synthetic construct
  source 1..19: mol_type = other RNA
tcgactgcaagtccgacgc

SEQ ID NO: 1795 - RNA, 19 nt, synthetic construct
  source 1..19: mol_type = other RNA
cgactgcaagtccgacgcc

SEQ ID NO: 1796 - RNA, 19 nt, synthetic construct
  source 1..19: mol_type = other RNA
gactgcaagtccgacgcct

SEQ ID NO: 1797 - RNA, 19 nt, synthetic construct
  source 1..19: mol_type = other RNA
actgcaagtccgacgcctg

SEQ ID NO: 1798 - RNA, 19 nt, synthetic construct
  source 1..19: mol_type = other RNA
ctgcaagtccgacgcctgc

SEQ ID NO: 1799 - RNA, 19 nt, synthetic construct
  source 1..19: mol_type = other RNA
tgcaagtccgacgcctgcc

SEQ ID NO: 1800 - RNA, 19 nt, synthetic construct
  source 1..19: mol_type = other RNA
gcaagtccgacgcctgcca

SEQ ID NO: 1801 - RNA, 19 nt, synthetic construct
  source 1..19: mol_type = other RNA
caagtccgacgcctgccag

SEQ ID NO: 1802 - RNA, 19 nt, synthetic construct
  source 1..19: mol_type = other RNA
aagtccgacgcctgccagg

SEQ ID NO: 1803 - RNA, 19 nt, synthetic construct
  source 1..19: mol_type = other RNA
agtccgacgcctgccaggg

SEQ ID NO: 1804 - RNA, 19 nt, synthetic construct
  source 1..19: mol_type = other RNA
gtccgacgcctgccagggg

SEQ ID NO: 1805 - RNA, 19 nt, synthetic construct
  source 1..19: mol_type = other RNA
tccgacgcctgccaggggg

SEQ ID NO: 1806 - RNA, 19 nt, synthetic construct
  source 1..19: mol_type = other RNA
ccgacgcctgccaggggga

SEQ ID NO: 1807 - RNA, 19 nt, synthetic construct
  source 1..19: mol_type = other RNA
cgacgcctgccagggggac

SEQ ID NO: 1808 - RNA, 19 nt, synthetic construct
  source 1..19: mol_type = other RNA
gacgcctgccagggggact

SEQ ID NO: 1809 - RNA, 19 nt, synthetic construct
  source 1..19: mol_type = other RNA
acgcctgccagggggactc

SEQ ID NO: 1810 - RNA, 19 nt, synthetic construct
  source 1..19: mol_type = other RNA
cgcctgccagggggactca

SEQ ID NO: 1811 - RNA, 19 nt, synthetic construct
  source 1..19: mol_type = other RNA
gcctgccagggggactcag

SEQ ID NO: 1812 - RNA, 19 nt, synthetic construct
  source 1..19: mol_type = other RNA
cctgccagggggactcagg

SEQ ID NO: 1813 - RNA, 19 nt, synthetic construct
  source 1..19: mol_type = other RNA
ctgccagggggactcaggg

SEQ ID NO: 1814 - RNA, 19 nt, synthetic construct
  source 1..19: mol_type = other RNA
tgccagggggactcagggg

SEQ ID NO: 1815 - RNA, 19 nt, synthetic construct
  source 1..19: mol_type = other RNA
gccagggggactcaggggg

SEQ ID NO: 1816 - RNA, 19 nt, synthetic construct
  source 1..19: mol_type = other RNA
ccagggggactcagggggg

SEQ ID NO: 1817 - RNA, 19 nt, synthetic construct
  source 1..19: mol_type = other RNA
cagggggactcaggggggc

SEQ ID NO: 1818 - RNA, 19 nt, synthetic construct
  source 1..19: mol_type = other RNA
agggggactcaggggggcc

SEQ ID NO: 1819 - RNA, 19 nt, synthetic construct
  source 1..19: mol_type = other RNA
gggggactcaggggggccc

SEQ ID NO: 1820 - RNA, 19 nt, synthetic construct
  source 1..19: mol_type = other RNA
ggggactcaggggggcccc

SEQ ID NO: 1821 - RNA, 19 nt, synthetic construct
  source 1..19: mol_type = other RNA
gggactcaggggggcccct

SEQ ID NO: 1822 - RNA, 19 nt, synthetic construct
  source 1..19: mol_type = other RNA
ggactcaggggggcccctg

SEQ ID NO: 1823 - RNA, 19 nt, synthetic construct
  source 1..19: mol_type = other RNA
gactcaggggggcccctgg

SEQ ID NO: 1824 - RNA, 19 nt, synthetic construct
  source 1..19: mol_type = other RNA
actcaggggggcccctggc

SEQ ID NO: 1825 - RNA, 19 nt, synthetic construct
  source 1..19: mol_type = other RNA
ctcaggggggcccctggcc

SEQ ID NO: 1826 - RNA, 19 nt, synthetic construct
  source 1..19: mol_type = other RNA
tcaggggggcccctggcct

SEQ ID NO: 1827 - RNA, 19 nt, synthetic construct
  source 1..19: mol_type = other RNA
caggggggcccctggcctg

SEQ ID NO: 1828 - RNA, 19 nt, synthetic construct
  source 1..19: mol_type = other RNA
aggggggcccctggcctgc

SEQ ID NO: 1829 - RNA, 19 nt, synthetic construct
  source 1..19: mol_type = other RNA
ggggggcccctggcctgcg

SEQ ID NO: 1830 - RNA, 19 nt, synthetic construct
  source 1..19: mol_type = other RNA
gggggcccctggcctgcga

SEQ ID NO: 1831 - RNA, 19 nt, synthetic construct
  source 1..19: mol_type = other RNA
ggggcccctggcctgcgag

SEQ ID NO: 1832 - RNA, 19 nt, synthetic construct
  source 1..19: mol_type = other RNA
gggcccctggcctgcgaga

SEQ ID NO: 1833 - RNA, 19 nt, synthetic construct
  source 1..19: mol_type = other RNA
ggcccctggcctgcgagaa

SEQ ID NO: 1834 - RNA, 19 nt, synthetic construct
  source 1..19: mol_type = other RNA
gcccctggcctgcgagaag

SEQ ID NO: 1835 - RNA, 19 nt, synthetic construct
  source 1..19: mol_type = other RNA
cccctggcctgcgagaaga

SEQ ID NO: 1836 - RNA, 19 nt, synthetic construct
  source 1..19: mol_type = other RNA
ccctggcctgcgagaagaa

SEQ ID NO: 1837 - RNA, 19 nt, synthetic construct
  source 1..19: mol_type = other RNA
cctggcctgcgagaagaac

SEQ ID NO: 1838 - RNA, 19 nt, synthetic construct
  source 1..19: mol_type = other RNA
ctggcctgcgagaagaacg

SEQ ID NO: 1839 - RNA, 19 nt, synthetic construct
  source 1..19: mol_type = other RNA
tggcctgcgagaagaacgg

SEQ ID NO: 1840 - RNA, 19 nt, synthetic construct
  source 1..19: mol_type = other RNA
ggcctgcgagaagaacggc

SEQ ID NO: 1841 - RNA, 19 nt, synthetic construct
  source 1..19: mol_type = other RNA
gcctgcgagaagaacggcg

SEQ ID NO: 1842 - RNA, 19 nt, synthetic construct
  source 1..19: mol_type = other RNA
cctgcgagaagaacggcgt

SEQ ID NO: 1843 - RNA, 19 nt, synthetic construct
  source 1..19: mol_type = other RNA
ctgcgagaagaacggcgtg

SEQ ID NO: 1844 - RNA, 19 nt, synthetic construct
  source 1..19: mol_type = other RNA
tgcgagaagaacggcgtgg

SEQ ID NO: 1845 - RNA, 19 nt, synthetic construct
  source 1..19: mol_type = other RNA
gcgagaagaacggcgtggc

SEQ ID NO: 1846 - RNA, 19 nt, synthetic construct
  source 1..19: mol_type = other RNA
cgagaagaacggcgtggct

SEQ ID NO: 1847 - RNA, 19 nt, synthetic construct
  source 1..19: mol_type = other RNA
gagaagaacggcgtggctt

SEQ ID NO: 1848 - RNA, 19 nt, synthetic construct
  source 1..19: mol_type = other RNA
agaagaacggcgtggctta

SEQ ID NO: 1849 - RNA, 19 nt, synthetic construct
  source 1..19: mol_type = other RNA
gaagaacggcgtggcttac

SEQ ID NO: 1850 - RNA, 19 nt, synthetic construct
  source 1..19: mol_type = other RNA
aagaacggcgtggcttacc

SEQ ID NO: 1851 - RNA, 19 nt, synthetic construct
  source 1..19: mol_type = other RNA
agaacggcgtggcttacct

SEQ ID NO: 1852 - RNA, 19 nt, synthetic construct
  source 1..19: mol_type = other RNA
gaacggcgtggcttacctc

SEQ ID NO: 1853 - RNA, 19 nt, synthetic construct
  source 1..19: mol_type = other RNA
aacggcgtggcttacctct

SEQ ID NO: 1854 - RNA, 19 nt, synthetic construct
  source 1..19: mol_type = other RNA
acggcgtggcttacctcta

SEQ ID NO: 1855 - RNA, 19 nt, synthetic construct
  source 1..19: mol_type = other RNA
cggcgtggcttacctctac

SEQ ID NO: 1856 - RNA, 19 nt, synthetic construct
  source 1..19: mol_type = other RNA
ggcgtggcttacctctacg

SEQ ID NO: 1857 - RNA, 19 nt, synthetic construct
  source 1..19: mol_type = other RNA
gcgtggcttacctctacgg

SEQ ID NO: 1858 - RNA, 19 nt, synthetic construct
  source 1..19: mol_type = other RNA
cgtggcttacctctacggc

SEQ ID NO: 1859 - RNA, 19 nt, synthetic construct
  source 1..19: mol_type = other RNA
gtggcttacctctacggca

SEQ ID NO: 1860 - RNA, 19 nt, synthetic construct
  source 1..19: mol_type = other RNA
tggcttacctctacggcat

SEQ ID NO: 1861 - RNA, 19 nt, synthetic construct
  source 1..19: mol_type = other RNA
ggcttacctctacggcatc

SEQ ID NO: 1862 - RNA, 19 nt, synthetic construct
  source 1..19: mol_type = other RNA
gcttacctctacggcatca

SEQ ID NO: 1863 - RNA, 19 nt, synthetic construct
  source 1..19: mol_type = other RNA
cttacctctacggcatcat

SEQ ID NO: 1864 - RNA, 19 nt, synthetic construct
  source 1..19: mol_type = other RNA
ttacctctacggcatcatc

SEQ ID NO: 1865 - RNA, 19 nt, synthetic construct
  source 1..19: mol_type = other RNA
tacctctacggcatcatca

SEQ ID NO: 1866 - RNA, 19 nt, synthetic construct
  source 1..19: mol_type = other RNA
acctctacggcatcatcag

SEQ ID NO: 1867 - RNA, 19 nt, synthetic construct
  source 1..19: mol_type = other RNA
cctctacggcatcatcagc

SEQ ID NO: 1868 - RNA, 19 nt, synthetic construct
  source 1..19: mol_type = other RNA
ctctacggcatcatcagct

SEQ ID NO: 1869 - RNA, 19 nt, synthetic construct
  source 1..19: mol_type = other RNA
tctacggcatcatcagctg

SEQ ID NO: 1870 - RNA, 19 nt, synthetic construct
  source 1..19: mol_type = other RNA
ctacggcatcatcagctgg

SEQ ID NO: 1871 - RNA, 19 nt, synthetic construct
  source 1..19: mol_type = other RNA
tacggcatcatcagctggg

SEQ ID NO: 1872 - RNA, 19 nt, synthetic construct
  source 1..19: mol_type = other RNA
acggcatcatcagctgggg

SEQ ID NO: 1873 - RNA, 19 nt, synthetic construct
  source 1..19: mol_type = other RNA
cggcatcatcagctggggt

SEQ ID NO: 1874 - RNA, 19 nt, synthetic construct
  source 1..19: mol_type = other RNA
ggcatcatcagctggggtg

SEQ ID NO: 1875 - RNA, 19 nt, synthetic construct
  source 1..19: mol_type = other RNA
gcatcatcagctggggtga

SEQ ID NO: 1876 - RNA, 19 nt, synthetic construct
  source 1..19: mol_type = other RNA
catcatcagctggggtgac

SEQ ID NO: 1877 - RNA, 19 nt, synthetic construct
  source 1..19: mol_type = other RNA
atcatcagctggggtgacg

SEQ ID NO: 1878 - RNA, 19 nt, synthetic construct
  source 1..19: mol_type = other RNA
tcatcagctggggtgacgg

SEQ ID NO: 1879 - RNA, 19 nt, synthetic construct
  source 1..19: mol_type = other RNA
catcagctggggtgacggc

SEQ ID NO: 1880 - RNA, 19 nt, synthetic construct
  source 1..19: mol_type = other RNA
atcagctggggtgacggct

SEQ ID NO: 1881 - RNA, 19 nt, synthetic construct
  source 1..19: mol_type = other RNA
tcagctggggtgacggctg

SEQ ID NO: 1882 - RNA, 19 nt, synthetic construct
  source 1..19: mol_type = other RNA
cagctggggtgacggctgc

SEQ ID NO: 1883 - RNA, 19 nt, synthetic construct
  source 1..19: mol_type = other RNA
agctggggtgacggctgcg

SEQ ID NO: 1884 - RNA, 19 nt, synthetic construct
  source 1..19: mol_type = other RNA
gctggggtgacggctgcgg

SEQ ID NO: 1885 - RNA, 19 nt, synthetic construct
  source 1..19: mol_type = other RNA
ctggggtgacggctgcggg

SEQ ID NO: 1886 - RNA, 19 nt, synthetic construct
  source 1..19: mol_type = other RNA
tggggtgacggctgcgggc

SEQ ID NO: 1887 - RNA, 19 nt, synthetic construct
  source 1..19: mol_type = other RNA
ggggtgacggctgcgggcg

SEQ ID NO: 1888 - RNA, 19 nt, synthetic construct
  source 1..19: mol_type = other RNA
gggtgacggctgcgggcgg

SEQ ID NO: 1889 - RNA, 19 nt, synthetic construct
  source 1..19: mol_type = other RNA
ggtgacggctgcgggcggc

SEQ ID NO: 1890 - RNA, 19 nt, synthetic construct
  source 1..19: mol_type = other RNA
gtgacggctgcgggcggct

SEQ ID NO: 1891 - RNA, 19 nt, synthetic construct
  source 1..19: mol_type = other RNA
tgacggctgcgggcggctc

SEQ ID NO: 1892 - RNA, 19 nt, synthetic construct
  source 1..19: mol_type = other RNA
gacggctgcgggcggctcc

SEQ ID NO: 1893 - RNA, 19 nt, synthetic construct
  source 1..19: mol_type = other RNA
acggctgcgggcggctcca

SEQ ID NO: 1894 - RNA, 19 nt, synthetic construct
  source 1..19: mol_type = other RNA
cggctgcgggcggctccac

SEQ ID NO: 1895 - RNA, 19 nt, synthetic construct
  source 1..19: mol_type = other RNA
ggctgcgggcggctccaca

SEQ ID NO: 1896 - RNA, 19 nt, synthetic construct
  source 1..19: mol_type = other RNA
gctgcgggcggctccacaa

SEQ ID NO: 1897 - RNA, 19 nt, synthetic construct
  source 1..19: mol_type = other RNA
ctgcgggcggctccacaag

SEQ ID NO: 1898 - RNA, 19 nt, synthetic construct
  source 1..19: mol_type = other RNA
tgcgggcggctccacaagc

SEQ ID NO: 1899 - RNA, 19 nt, synthetic construct
  source 1..19: mol_type = other RNA
gcgggcggctccacaagcc

SEQ ID NO: 1900 - RNA, 19 nt, synthetic construct
  source 1..19: mol_type = other RNA
cgggcggctccacaagccg

SEQ ID NO: 1901 - RNA, 19 nt, synthetic construct
  source 1..19: mol_type = other RNA
gggcggctccacaagccgg

SEQ ID NO: 1902 - RNA, 19 nt, synthetic construct
  source 1..19: mol_type = other RNA
ggcggctccacaagccggg

SEQ ID NO: 1903 - RNA, 19 nt, synthetic construct
  source 1..19: mol_type = other RNA
gcggctccacaagccgggg

SEQ ID NO: 1904 - RNA, 19 nt, synthetic construct
  source 1..19: mol_type = other RNA
cggctccacaagccggggg

SEQ ID NO: 1905 - RNA, 19 nt, synthetic construct
  source 1..19: mol_type = other RNA
ggctccacaagccgggggt

SEQ ID NO: 1906 - RNA, 19 nt, synthetic construct
  source 1..19: mol_type = other RNA
gctccacaagccgggggtc

SEQ ID NO: 1907 - RNA, 19 nt, synthetic construct
  source 1..19: mol_type = other RNA
ctccacaagccgggggtct

SEQ ID NO: 1908 - RNA, 19 nt, synthetic construct
  source 1..19: mol_type = other RNA
tccacaagccgggggtcta

SEQ ID NO: 1909 - RNA, 19 nt, synthetic construct
  source 1..19: mol_type = other RNA
ccacaagccgggggtctac

SEQ ID NO: 1910 - RNA, 19 nt, synthetic construct
  source 1..19: mol_type = other RNA
cacaagccgggggtctaca

SEQ ID NO: 1911 - RNA, 19 nt, synthetic construct
  source 1..19: mol_type = other RNA
acaagccgggggtctacac

SEQ ID NO: 1912 - RNA, 19 nt, synthetic construct
  source 1..19: mol_type = other RNA
caagccgggggtctacacc

SEQ ID NO: 1913 - RNA, 19 nt, synthetic construct
  source 1..19: mol_type = other RNA
aagccgggggtctacaccc

SEQ ID NO: 1914 - RNA, 19 nt, synthetic construct
  source 1..19: mol_type = other RNA
agccgggggtctacacccg

SEQ ID NO: 1915 - RNA, 19 nt, synthetic construct
  source 1..19: mol_type = other RNA
gccgggggtctacacccgc

SEQ ID NO: 1916 - RNA, 19 nt, synthetic construct
  source 1..19: mol_type = other RNA
ccgggggtctacacccgcg

SEQ ID NO: 1917 - RNA, 19 nt, synthetic construct
  source 1..19: mol_type = other RNA
cgggggtctacacccgcgt

SEQ ID NO: 1918 - RNA, 19 nt, synthetic construct
  source 1..19: mol_type = other RNA
gggggtctacacccgcgtg

SEQ ID NO: 1919 - RNA, 19 nt, synthetic construct
  source 1..19: mol_type = other RNA
ggggtctacacccgcgtgg

SEQ ID NO: 1920 - RNA, 19 nt, synthetic construct
  source 1..19: mol_type = other RNA
gggtctacacccgcgtggc

SEQ ID NO: 1921 - RNA, 19 nt, synthetic construct
  source 1..19: mol_type = other RNA
ggtctacacccgcgtggcc

SEQ ID NO: 1922 - RNA, 19 nt, synthetic construct
  source 1..19: mol_type = other RNA
gtctacacccgcgtggcca

SEQ ID NO: 1923 - RNA, 19 nt, synthetic construct
  source 1..19: mol_type = other RNA
tctacacccgcgtggccaa

SEQ ID NO: 1924 - RNA, 19 nt, synthetic construct
  source 1..19: mol_type = other RNA
ctacacccgcgtggccaac

SEQ ID NO: 1925 - RNA, 19 nt, synthetic construct
  source 1..19: mol_type = other RNA
tacacccgcgtggccaact

SEQ ID NO: 1926 - RNA, 19 nt, synthetic construct
  source 1..19: mol_type = other RNA
acacccgcgtggccaacta

SEQ ID NO: 1927 - RNA, 19 nt, synthetic construct
  source 1..19: mol_type = other RNA
cacccgcgtggccaactat

SEQ ID NO: 1928 - RNA, 19 nt, synthetic construct
  source 1..19: mol_type = other RNA
acccgcgtggccaactatg

SEQ ID NO: 1929 - RNA, 19 nt, synthetic construct
  source 1..19: mol_type = other RNA
cccgcgtggccaactatgt

SEQ ID NO: 1930 - RNA, 19 nt, synthetic construct
  source 1..19: mol_type = other RNA
ccgcgtggccaactatgtg

SEQ ID NO: 1931 - RNA, 19 nt, synthetic construct
  source 1..19: mol_type = other RNA
cgcgtggccaactatgtgg

SEQ ID NO: 1932 - RNA, 19 nt, synthetic construct
  source 1..19: mol_type = other RNA
gcgtggccaactatgtgga

SEQ ID NO: 1933 - RNA, 19 nt, synthetic construct
  source 1..19: mol_type = other RNA
cgtggccaactatgtggac

SEQ ID NO: 1934 - RNA, 19 nt, synthetic construct
  source 1..19: mol_type = other RNA
gtggccaactatgtggact

SEQ ID NO: 1935 - RNA, 19 nt, synthetic construct
  source 1..19: mol_type = other RNA
tggccaactatgtggactg

SEQ ID NO: 1936 - RNA, 19 nt, synthetic construct
  source 1..19: mol_type = other RNA
ggccaactatgtggactgg

SEQ ID NO: 1937 - RNA, 19 nt, synthetic construct
  source 1..19: mol_type = other RNA
gccaactatgtggactgga

SEQ ID NO: 1938 - RNA, 19 nt, synthetic construct
  source 1..19: mol_type = other RNA
ccaactatgtggactggat

SEQ ID NO: 1939 - RNA, 19 nt, synthetic construct
  source 1..19: mol_type = other RNA
caactatgtggactggatc

SEQ ID NO: 1940 - RNA, 19 nt, synthetic construct
  source 1..19: mol_type = other RNA
aactatgtggactggatca

SEQ ID NO: 1941 - RNA, 19 nt, synthetic construct
  source 1..19: mol_type = other RNA
actatgtggactggatcaa

SEQ ID NO: 1942 - RNA, 19 nt, synthetic construct
  source 1..19: mol_type = other RNA
ctatgtggactggatcaac

SEQ ID NO: 1943 - RNA, 19 nt, synthetic construct
  source 1..19: mol_type = other RNA
tatgtggactggatcaacg

SEQ ID NO: 1944 - RNA, 19 nt, synthetic construct
  source 1..19: mol_type = other RNA
atgtggactggatcaacga

SEQ ID NO: 1945 - RNA, 19 nt, synthetic construct
  source 1..19: mol_type = other RNA
tgtggactggatcaacgac

SEQ ID NO: 1946 - RNA, 19 nt, synthetic construct
  source 1..19: mol_type = other RNA
gtggactggatcaacgacc

SEQ ID NO: 1947 - RNA, 19 nt, synthetic construct
  source 1..19: mol_type = other RNA
tggactggatcaacgaccg

SEQ ID NO: 1948 - RNA, 19 nt, synthetic construct
  source 1..19: mol_type = other RNA
ggactggatcaacgaccgg

SEQ ID NO: 1949 - RNA, 19 nt, synthetic construct
  source 1..19: mol_type = other RNA
gactggatcaacgaccgga

SEQ ID NO: 1950 - RNA, 19 nt, synthetic construct
  source 1..19: mol_type = other RNA
actggatcaacgaccggat

SEQ ID NO: 1951 - RNA, 19 nt, synthetic construct
  source 1..19: mol_type = other RNA
ctggatcaacgaccggata

SEQ ID NO: 1952 - RNA, 19 nt, synthetic construct
  source 1..19: mol_type = other RNA
tggatcaacgaccggatac

SEQ ID NO: 1953 - RNA, 19 nt, synthetic construct
  source 1..19: mol_type = other RNA
ggatcaacgaccggatacg

SEQ ID NO: 1954 - RNA, 19 nt, synthetic construct
  source 1..19: mol_type = other RNA
gatcaacgaccggatacgg

SEQ ID NO: 1955 - RNA, 19 nt, synthetic construct
  source 1..19: mol_type = other RNA
atcaacgaccggatacggc

SEQ ID NO: 1956 - RNA, 19 nt, synthetic construct
  source 1..19: mol_type = other RNA
tcaacgaccggatacggcc

SEQ ID NO: 1957 - RNA, 19 nt, synthetic construct
  source 1..19: mol_type = other RNA
caacgaccggatacggcct

SEQ ID NO: 1958 - RNA, 19 nt, synthetic construct
  source 1..19: mol_type = other RNA
aacgaccggatacggcctc

SEQ ID NO: 1959 - RNA, 19 nt, synthetic construct
  source 1..19: mol_type = other RNA
acgaccggatacggcctcc

SEQ ID NO: 1960 - RNA, 19 nt, synthetic construct
  source 1..19: mol_type = other RNA
cgaccggatacggcctccc

SEQ ID NO: 1961 - RNA, 19 nt, synthetic construct
  source 1..19: mol_type = other RNA
gaccggatacggcctccca

SEQ ID NO: 1962 - RNA, 19 nt, synthetic construct
  source 1..19: mol_type = other RNA
accggatacggcctcccag

SEQ ID NO: 1963 - RNA, 19 nt, synthetic construct
  source 1..19: mol_type = other RNA
ccggatacggcctcccagg

SEQ ID NO: 1964 - RNA, 19 nt, synthetic construct
  source 1..19: mol_type = other RNA
cggatacggcctcccaggc

SEQ ID NO: 1965 - RNA, 19 nt, synthetic construct
  source 1..19: mol_type = other RNA
ggatacggcctcccaggcg

SEQ ID NO: 1966 - RNA, 19 nt, synthetic construct
  source 1..19: mol_type = other RNA
gatacggcctcccaggcgg

SEQ ID NO: 1967 - RNA, 19 nt, synthetic construct
  source 1..19: mol_type = other RNA
atacggcctcccaggcggc

SEQ ID NO: 1968 - RNA, 19 nt, synthetic construct
  source 1..19: mol_type = other RNA
tacggcctcccaggcggct

SEQ ID NO: 1969 - RNA, 19 nt, synthetic construct
  source 1..19: mol_type = other RNA
acggcctcccaggcggctt

SEQ ID NO: 1970 - RNA, 19 nt, synthetic construct
  source 1..19: mol_type = other RNA
cggcctcccaggcggcttg

SEQ ID NO: 1971 - RNA, 19 nt, synthetic construct
  source 1..19: mol_type = other RNA
ggcctcccaggcggcttgt

SEQ ID NO: 1972 - RNA, 19 nt, synthetic construct
  source 1..19: mol_type = other RNA
gcctcccaggcggcttgtg

SEQ ID NO: 1973 - RNA, 19 nt, synthetic construct
  source 1..19: mol_type = other RNA
cctcccaggcggcttgtgg

SEQ ID NO: 1974 - RNA, 19 nt, synthetic construct
  source 1..19: mol_type = other RNA
ctcccaggcggcttgtggc

SEQ ID NO: 1975 - RNA, 19 nt, synthetic construct
  source 1..19: mol_type = other RNA
tcccaggcggcttgtggct

SEQ ID NO: 1976 - RNA, 19 nt, synthetic construct
  source 1..19: mol_type = other RNA
cccaggcggcttgtggctc

SEQ ID NO: 1977 - RNA, 19 nt, synthetic construct
  source 1..19: mol_type = other RNA
ccaggcggcttgtggctcc

SEQ ID NO: 1978 - RNA, 19 nt, synthetic construct
  source 1..19: mol_type = other RNA
caggcggcttgtggctccc

SEQ ID NO: 1979 - RNA, 19 nt, synthetic construct
  source 1..19: mol_type = other RNA
aggcggcttgtggctccct

SEQ ID NO: 1980 - RNA, 19 nt, synthetic construct
  source 1..19: mol_type = other RNA
ggcggcttgtggctccctc

SEQ ID NO: 1981 - RNA, 19 nt, synthetic construct
  source 1..19: mol_type = other RNA
gcggcttgtggctccctcc

SEQ ID NO: 1982 - RNA, 19 nt, synthetic construct
  source 1..19: mol_type = other RNA
cggcttgtggctccctcct

SEQ ID NO: 1983 - RNA, 19 nt, synthetic construct
  source 1..19: mol_type = other RNA
ggcttgtggctccctcctg

SEQ ID NO: 1984 - RNA, 19 nt, synthetic construct
  source 1..19: mol_type = other RNA
gcttgtggctccctcctga

SEQ ID NO: 1985 - RNA, 19 nt, synthetic construct
  source 1..19: mol_type = other RNA
cttgtggctccctcctgac

SEQ ID NO: 1986 - RNA, 19 nt, synthetic construct
  source 1..19: mol_type = other RNA
ttgtggctccctcctgacc

SEQ ID NO: 1987 - RNA, 19 nt, synthetic construct
  source 1..19: mol_type = other RNA
tgtggctccctcctgaccc

SEQ ID NO: 1988 - RNA, 19 nt, synthetic construct
  source 1..19: mol_type = other RNA
gtggctccctcctgaccct

SEQ ID NO: 1989 - RNA, 19 nt, synthetic construct
  source 1..19: mol_type = other RNA
tggctccctcctgaccctc

SEQ ID NO: 1990 - RNA, 19 nt, synthetic construct
  source 1..19: mol_type = other RNA
ggctccctcctgaccctcc

SEQ ID NO: 1991 - RNA, 19 nt, synthetic construct
  source 1..19: mol_type = other RNA
gctccctcctgaccctcca

SEQ ID NO: 1992 - RNA, 19 nt, synthetic construct
  source 1..19: mol_type = other RNA
ctccctcctgaccctccag

SEQ ID NO: 1993 - RNA, 19 nt, synthetic construct
  source 1..19: mol_type = other RNA
tccctcctgaccctccagc

SEQ ID NO: 1994 - RNA, 19 nt, synthetic construct
  source 1..19: mol_type = other RNA
ccctcctgaccctccagcg

SEQ ID NO: 1995 - RNA, 19 nt, synthetic construct
  source 1..19: mol_type = other RNA
cctcctgaccctccagcgg

SEQ ID NO: 1996 - RNA, 19 nt, synthetic construct
  source 1..19: mol_type = other RNA
ctcctgaccctccagcggg

SEQ ID NO: 1997 - RNA, 19 nt, synthetic construct
  source 1..19: mol_type = other RNA
tcctgaccctccagcggga

SEQ ID NO: 1998 - RNA, 19 nt, synthetic construct
  source 1..19: mol_type = other RNA
cctgaccctccagcgggac

SEQ ID NO: 1999 - RNA, 19 nt, synthetic construct
  source 1..19: mol_type = other RNA
ctgaccctccagcgggaca

SEQ ID NO: 2000 - RNA, 19 nt, synthetic construct
  source 1..19: mol_type = other RNA
tgaccctccagcgggacac

SEQ ID NO: 2001 - RNA, 19 nt, synthetic construct
  source 1..19: mol_type = other RNA
gaccctccagcgggacacc

SEQ ID NO: 2002 - RNA, 19 nt, synthetic construct
  source 1..19: mol_type = other RNA
accctccagcgggacaccc

SEQ ID NO: 2003 - RNA, 19 nt, synthetic construct
  source 1..19: mol_type = other RNA
ccctccagcgggacaccct

SEQ ID NO: 2004 - RNA, 19 nt, synthetic construct
  source 1..19: mol_type = other RNA
cctccagcgggacaccctg

SEQ ID NO: 2005 - RNA, 19 nt, synthetic construct
  source 1..19: mol_type = other RNA
ctccagcgggacaccctgg

SEQ ID NO: 2006 - RNA, 19 nt, synthetic construct
  source 1..19: mol_type = other RNA
tccagcgggacaccctggt

SEQ ID NO: 2007 - RNA, 19 nt, synthetic construct
  source 1..19: mol_type = other RNA
ccagcgggacaccctggtt

SEQ ID NO: 2008 - RNA, 19 nt, synthetic construct
  source 1..19: mol_type = other RNA
cagcgggacaccctggttc

SEQ ID NO: 2009 - RNA, 19 nt, synthetic construct
  source 1..19: mol_type = other RNA
agcgggacaccctggttcc

SEQ ID NO: 2010 - RNA, 19 nt, synthetic construct
  source 1..19: mol_type = other RNA
gcgggacaccctggttccc

SEQ ID NO: 2011 - RNA, 19 nt, synthetic construct
  source 1..19: mol_type = other RNA
cgggacaccctggttccca

SEQ ID NO: 2012 - RNA, 19 nt, synthetic construct
  source 1..19: mol_type = other RNA
gggacaccctggttcccac

SEQ ID NO: 2013 - RNA, 19 nt, synthetic construct
  source 1..19: mol_type = other RNA
ggacaccctggttcccacc

SEQ ID NO: 2014 - RNA, 19 nt, synthetic construct
  source 1..19: mol_type = other RNA
gacaccctggttcccacca

SEQ ID NO: 2015 - RNA, 19 nt, synthetic construct
  source 1..19: mol_type = other RNA
acaccctggttcccaccat

SEQ ID NO: 2016 - RNA, 19 nt, synthetic construct
  source 1..19: mol_type = other RNA
caccctggttcccaccatt

SEQ ID NO: 2017 - RNA, 19 nt, synthetic construct
  source 1..19: mol_type = other RNA
accctggttcccaccattc

SEQ ID NO: 2018 - RNA, 19 nt, synthetic construct
  source 1..19: mol_type = other RNA
ccctggttcccaccattcc

SEQ ID NO: 2019 - RNA, 19 nt, synthetic construct
  source 1..19: mol_type = other RNA
cctggttcccaccattccc

SEQ ID NO: 2020 - RNA, 19 nt, synthetic construct
  source 1..19: mol_type = other RNA
ctggttcccaccattccct

SEQ ID NO: 2021 - RNA, 19 nt, synthetic construct
  source 1..19: mol_type = other RNA
tggttcccaccattccctg

SEQ ID NO: 2022 - RNA, 19 nt, synthetic construct
  source 1..19: mol_type = other RNA
ggttcccaccattccctgc

SEQ ID NO: 2023 - RNA, 19 nt, synthetic construct
  source 1..19: mol_type = other RNA
gttcccaccattccctgcc

SEQ ID NO: 2024 - RNA, 19 nt, synthetic construct
  source 1..19: mol_type = other RNA
ttcccaccattccctgcct

SEQ ID NO: 2025 - RNA, 19 nt, synthetic construct
  source 1..19: mol_type = other RNA
tcccaccattccctgcctt

SEQ ID NO: 2026 - RNA, 19 nt, synthetic construct
  source 1..19: mol_type = other RNA
cccaccattccctgccttg

SEQ ID NO: 2027 - RNA, 19 nt, synthetic construct
  source 1..19: mol_type = other RNA
ccaccattccctgccttgc

SEQ ID NO: 2028 - RNA, 19 nt, synthetic construct
  source 1..19: mol_type = other RNA
caccattccctgccttgct

SEQ ID NO: 2029 - RNA, 19 nt, synthetic construct
  source 1..19: mol_type = other RNA
accattccctgccttgctg

SEQ ID NO: 2030 - RNA, 19 nt, synthetic construct
  source 1..19: mol_type = other RNA
ccattccctgccttgctga

SEQ ID NO: 2031 - RNA, 19 nt, synthetic construct
  source 1..19: mol_type = other RNA
cattccctgccttgctgac

SEQ ID NO: 2032 - RNA, 19 nt, synthetic construct
  source 1..19: mol_type = other RNA
attccctgccttgctgaca

SEQ ID NO: 2033 - RNA, 19 nt, synthetic construct
  source 1..19: mol_type = other RNA
ttccctgccttgctgacaa

SEQ ID NO: 2034 - RNA, 19 nt, synthetic construct
  source 1..19: mol_type = other RNA
tccctgccttgctgacaat

SEQ ID NO: 2035 - RNA, 19 nt, synthetic construct
  source 1..19: mol_type = other RNA
ccctgccttgctgacaata

SEQ ID NO: 2036 - RNA, 19 nt, synthetic construct
  source 1..19: mol_type = other RNA
cctgccttgctgacaataa

SEQ ID NO: 2037 - RNA, 19 nt, synthetic construct
  source 1..19: mol_type = other RNA
ctgccttgctgacaataaa

SEQ ID NO: 2038 - RNA, 19 nt, synthetic construct
  source 1..19: mol_type = other RNA
tgccttgctgacaataaag

SEQ ID NO: 2039 - RNA, 19 nt, synthetic construct
  source 1..19: mol_type = other RNA
gccttgctgacaataaaga

SEQ ID NO: 2040 - RNA, 19 nt, synthetic construct
  source 1..19: mol_type = other RNA
ccttgctgacaataaagat

SEQ ID NO: 2041 - RNA, 19 nt, synthetic construct
  source 1..19: mol_type = other RNA
cttgctgacaataaagata

SEQ ID NO: 2042 - RNA, 19 nt, synthetic construct
  source 1..19: mol_type = other RNA
ttgctgacaataaagatat

SEQ ID NO: 2043 - RNA, 19 nt, synthetic construct
  source 1..19: mol_type = other RNA
tgctgacaataaagatatt

SEQ ID NO: 2044 - RNA, 19 nt, synthetic construct
  source 1..19: mol_type = other RNA
gctgacaataaagatattt

SEQ ID NO: 2045 - RNA, 19 nt, synthetic construct
  source 1..19: mol_type = other RNA
ctgacaataaagatatttc

SEQ ID NO: 2046 - RNA, 19 nt, synthetic construct
  source 1..19: mol_type = other RNA
tgacaataaagatatttcc

SEQ ID NO: 2047 - RNA, 19 nt, synthetic construct
  source 1..19: mol_type = other RNA
gacaataaagatatttcca

SEQ ID NO: 2048 - RNA, 19 nt, synthetic construct
  source 1..19: mol_type = other RNA
acaataaagatatttccaa

SEQ ID NO: 2049 - RNA, 19 nt, synthetic construct
  source 1..19: mol_type = other RNA
caataaagatatttccaag

SEQ ID NO: 2050 - RNA, 19 nt, synthetic construct
  source 1..19: mol_type = other RNA
aataaagatatttccaaga

SEQ ID NO: 2051 - RNA, 19 nt, synthetic construct
  source 1..19: mol_type = other RNA
ataaagatatttccaagaa

SEQ ID NO: 2052 - RNA, 19 nt, synthetic construct
  source 1..19: mol_type = other RNA
ctgaggggcagtgggaggc

SEQ ID NO: 2053 - RNA, 19 nt, synthetic construct
  source 1..19: mol_type = other RNA
cctgaggggcagtgggagg

SEQ ID NO: 2054 - RNA, 19 nt, synthetic construct
  source 1..19: mol_type = other RNA
gcctgaggggcagtgggag

SEQ ID NO: 2055 - RNA, 19 nt, synthetic construct
  source 1..19: mol_type = other RNA
ggcctgaggggcagtggga

SEQ ID NO: 2056 - RNA, 19 nt, synthetic construct
  source 1..19: mol_type = other RNA
tggcctgaggggcagtggg

SEQ ID NO: 2057 - RNA, 19 nt, synthetic construct
  source 1..19: mol_type = other RNA
ctggcctgaggggcagtgg

SEQ ID NO: 2058 - RNA, 19 nt, synthetic construct
  source 1..19: mol_type = other RNA
gctggcctgaggggcagtg

SEQ ID NO: 2059 - RNA, 19 nt, synthetic construct
  source 1..19: mol_type = other RNA
agctggcctgaggggcagt

SEQ ID NO: 2060 - RNA, 19 nt, synthetic construct
  source 1..19: mol_type = other RNA
gagctggcctgaggggcag

SEQ ID NO: 2061 - RNA, 19 nt, synthetic construct
  source 1..19: mol_type = other RNA
tgagctggcctgaggggca

SEQ ID NO: 2062 - RNA, 19 nt, synthetic construct
  source 1..19: mol_type = other RNA
ctgagctggcctgaggggc

SEQ ID NO: 2063 - RNA, 19 nt, synthetic construct
  source 1..19: mol_type = other RNA
cctgagctggcctgagggg

SEQ ID NO: 2064 - RNA, 19 nt, synthetic construct
  source 1..19: mol_type = other RNA
tcctgagctggcctgaggg

SEQ ID NO: 2065 - RNA, 19 nt, synthetic construct
  source 1..19: mol_type = other RNA
ctcctgagctggcctgagg

SEQ ID NO: 2066 - RNA, 19 nt, synthetic construct
  source 1..19: mol_type = other RNA
gctcctgagctggcctgag

SEQ ID NO: 2067 - RNA, 19 nt, synthetic construct
  source 1..19: mol_type = other RNA
ggctcctgagctggcctga

SEQ ID NO: 2068 - RNA, 19 nt, synthetic construct
  source 1..19: mol_type = other RNA
tggctcctgagctggcctg

SEQ ID NO: 2069 - RNA, 19 nt, synthetic construct
  source 1..19: mol_type = other RNA
atggctcctgagctggcct

SEQ ID NO: 2070 - RNA, 19 nt, synthetic construct
  source 1..19: mol_type = other RNA
catggctcctgagctggcc

SEQ ID NO: 2071 - RNA, 19 nt, synthetic construct
  source 1..19: mol_type = other RNA
ccatggctcctgagctggc

SEQ ID NO: 2072 - RNA, 19 nt, synthetic construct
  source 1..19: mol_type = other RNA
cccatggctcctgagctgg

SEQ ID NO: 2073 - RNA, 19 nt, synthetic construct
  source 1..19: mol_type = other RNA
ccccatggctcctgagctg

SEQ ID NO: 2074 - RNA, 19 nt, synthetic construct
  source 1..19: mol_type = other RNA
gccccatggctcctgagct

SEQ ID NO: 2075 - RNA, 19 nt, synthetic construct
  source 1..19: mol_type = other RNA
cgccccatggctcctgagc

SEQ ID NO: 2076 - RNA, 19 nt, synthetic construct
  source 1..19: mol_type = other RNA
gcgccccatggctcctgag

SEQ ID NO: 2077 - RNA, 19 nt, synthetic construct
  source 1..19: mol_type = other RNA
agcgccccatggctcctga

SEQ ID NO: 2078 - RNA, 19 nt, synthetic construct
  source 1..19: mol_type = other RNA
cagcgccccatggctcctg

SEQ ID NO: 2079 - RNA, 19 nt, synthetic construct
  source 1..19: mol_type = other RNA
ccagcgccccatggctcct

SEQ ID NO: 2080 - RNA, 19 nt, synthetic construct
  source 1..19: mol_type = other RNA
cccagcgccccatggctcc

SEQ ID NO: 2081 - RNA, 19 nt, synthetic construct
  source 1..19: mol_type = other RNA
gcccagcgccccatggctc

SEQ ID NO: 2082 - RNA, 19 nt, synthetic construct
  source 1..19: mol_type = other RNA
ggcccagcgccccatggct

SEQ ID NO: 2083 - RNA, 19 nt, synthetic construct
  source 1..19: mol_type = other RNA
aggcccagcgccccatggc

SEQ ID NO: 2084 - RNA, 19 nt, synthetic construct
  source 1..19: mol_type = other RNA
caggcccagcgccccatgg

SEQ ID NO: 2085 - RNA, 19 nt, synthetic construct
  source 1..19: mol_type = other RNA
ccaggcccagcgccccatg

SEQ ID NO: 2086 - RNA, 19 nt, synthetic construct
  source 1..19: mol_type = other RNA
cccaggcccagcgccccat

SEQ ID NO: 2087 - RNA, 19 nt, synthetic construct
  source 1..19: mol_type = other RNA
acccaggcccagcgcccca

SEQ ID NO: 2088 - RNA, 19 nt, synthetic construct
  source 1..19: mol_type = other RNA
gacccaggcccagcgcccc

SEQ ID NO: 2089 - RNA, 19 nt, synthetic construct
  source 1..19: mol_type = other RNA
ggacccaggcccagcgccc

SEQ ID NO: 2090 - RNA, 19 nt, synthetic construct
  source 1..19: mol_type = other RNA
gggacccaggcccagcgcc

SEQ ID NO: 2091 - RNA, 19 nt, synthetic construct
  source 1..19: mol_type = other RNA
ggggacccaggcccagcgc

SEQ ID NO: 2092 - RNA, 19 nt, synthetic construct
  source 1..19: mol_type = other RNA
tggggacccaggcccagcg

SEQ ID NO: 2093 - RNA, 19 nt, synthetic construct
  source 1..19: mol_type = other RNA
ctggggacccaggcccagc

SEQ ID NO: 2094 - RNA, 19 nt, synthetic construct
  source 1..19: mol_type = other RNA
gctggggacccaggcccag

SEQ ID NO: 2095 - RNA, 19 nt, synthetic construct
  source 1..19: mol_type = other RNA
ggctggggacccaggccca

SEQ ID NO: 2096 - RNA, 19 nt, synthetic construct
  source 1..19: mol_type = other RNA
gggctggggacccaggccc

SEQ ID NO: 2097 - RNA, 19 nt, synthetic construct
  source 1..19: mol_type = other RNA
ggggctggggacccaggcc

SEQ ID NO: 2098 - RNA, 19 nt, synthetic construct
  source 1..19: mol_type = other RNA
aggggctggggacccaggc

SEQ ID NO: 2099 - RNA, 19 nt, synthetic construct
  source 1..19: mol_type = other RNA
caggggctggggacccagg

SEQ ID NO: 2100 - RNA, 19 nt, synthetic construct
  source 1..19: mol_type = other RNA
ccaggggctggggacccag

SEQ ID NO: 2101 - RNA, 19 nt, synthetic construct
  source 1..19: mol_type = other RNA
gccaggggctggggaccca

SEQ ID NO: 2102 - RNA, 19 nt, synthetic construct
  source 1..19: mol_type = other RNA
ggccaggggctggggaccc

SEQ ID NO: 2103 - RNA, 19 nt, synthetic construct
  source 1..19: mol_type = other RNA
gggccaggggctggggacc

SEQ ID NO: 2104 - RNA, 19 nt, synthetic construct
  source 1..19: mol_type = other RNA
ggggccaggggctggggac

SEQ ID NO: 2105 - RNA, 19 nt, synthetic construct
  source 1..19: mol_type = other RNA
gggggccaggggctgggga

SEQ ID NO: 2106 - RNA, 19 nt, synthetic construct
  source 1..19: mol_type = other RNA
tgggggccaggggctgggg

SEQ ID NO: 2107 - RNA, 19 nt, synthetic construct
  source 1..19: mol_type = other RNA
gtgggggccaggggctggg

SEQ ID NO: 2108 - RNA, 19 nt, synthetic construct
  source 1..19: mol_type = other RNA
ggtgggggccaggggctgg

SEQ ID NO: 2109 - RNA, 19 nt, synthetic construct
  source 1..19: mol_type = other RNA
cggtgggggccaggggctg

SEQ ID NO: 2110 - RNA, 19 nt, synthetic construct
  source 1..19: mol_type = other RNA
ccggtgggggccaggggct

SEQ ID NO: 2111 - RNA, 19 nt, synthetic construct
  source 1..19: mol_type = other RNA
cccggtgggggccaggggc

SEQ ID NO: 2112 - RNA, 19 nt, synthetic construct
  source 1..19: mol_type = other RNA
ccccggtgggggccagggg

SEQ ID NO: 2113 - RNA, 19 nt, synthetic construct
  source 1..19: mol_type = other RNA
gccccggtgggggccaggg

SEQ ID NO: 2114 - RNA, 19 nt, synthetic construct
  source 1..19: mol_type = other RNA
agccccggtgggggccagg

SEQ ID NO: 2115 - RNA, 19 nt, synthetic construct
  source 1..19: mol_type = other RNA
cagccccggtgggggccag

SEQ ID NO: 2116 - RNA, 19 nt, synthetic construct
  source 1..19: mol_type = other RNA
ccagccccggtgggggcca

SEQ ID NO: 2117 - RNA, 19 nt, synthetic construct
  source 1..19: mol_type = other RNA
cccagccccggtgggggcc

SEQ ID NO: 2118 - RNA, 19 nt, synthetic construct
  source 1..19: mol_type = other RNA
gcccagccccggtgggggc

SEQ ID NO: 2119 - RNA, 19 nt, synthetic construct
  source 1..19: mol_type = other RNA
ggcccagccccggtggggg

SEQ ID NO: 2120 - RNA, 19 nt, synthetic construct
  source 1..19: mol_type = other RNA
gggcccagccccggtgggg

SEQ ID NO: 2121 - RNA, 19 nt, synthetic construct
  source 1..19: mol_type = other RNA
ggggcccagccccggtggg

SEQ ID NO: 2122 - RNA, 19 nt, synthetic construct
  source 1..19: mol_type = other RNA
aggggcccagccccggtgg

SEQ ID NO: 2123 - RNA, 19 nt, synthetic construct
  source 1..19: mol_type = other RNA
aaggggcccagccccggtg

SEQ ID NO: 2124 - RNA, 19 nt, synthetic construct
  source 1..19: mol_type = other RNA
gaaggggcccagccccggt

SEQ ID NO: 2125 - RNA, 19 nt, synthetic construct
  source 1..19: mol_type = other RNA
ggaaggggcccagccccgg

SEQ ID NO: 2126 - RNA, 19 nt, synthetic construct
  source 1..19: mol_type = other RNA
aggaaggggcccagccccg

SEQ ID NO: 2127 - RNA, 19 nt, synthetic construct
  source 1..19: mol_type = other RNA
gaggaaggggcccagcccc

SEQ ID NO: 2128 - RNA, 19 nt, synthetic construct
  source 1..19: mol_type = other RNA
ggaggaaggggcccagccc

SEQ ID NO: 2129 - RNA, 19 nt, synthetic construct
  source 1..19: mol_type = other RNA
aggaggaaggggcccagcc

SEQ ID NO: 2130 - RNA, 19 nt, synthetic construct
  source 1..19: mol_type = other RNA
gaggaggaaggggcccagc

SEQ ID NO: 2131 - RNA, 19 nt, synthetic construct
  source 1..19: mol_type = other RNA
ggaggaggaaggggcccag

SEQ ID NO: 2132 - RNA, 19 nt, synthetic construct
  source 1..19: mol_type = other RNA
aggaggaggaaggggccca

SEQ ID NO: 2133 - RNA, 19 nt, synthetic construct
  source 1..19: mol_type = other RNA
gaggaggaggaaggggccc

SEQ ID NO: 2134 - RNA, 19 nt, synthetic construct
  source 1..19: mol_type = other RNA
ggaggaggaggaaggggcc

SEQ ID NO: 2135 - RNA, 19 nt, synthetic construct
  source 1..19: mol_type = other RNA
aggaggaggaggaaggggc

SEQ ID NO: 2136 - RNA, 19 nt, synthetic construct
  source 1..19: mol_type = other RNA
gaggaggaggaggaagggg

SEQ ID NO: 2137 - RNA, 19 nt, synthetic construct
  source 1..19: mol_type = other RNA
ggaggaggaggaggaaggg

SEQ ID NO: 2138 - RNA, 19 nt, synthetic construct
  source 1..19: mol_type = other RNA
aggaggaggaggaggaagg

SEQ ID NO: 2139 - RNA, 19 nt, synthetic construct
  source 1..19: mol_type = other RNA
caggaggaggaggaggaag

SEQ ID NO: 2140 - RNA, 19 nt, synthetic construct
  source 1..19: mol_type = other RNA
gcaggaggaggaggaggaa

SEQ ID NO: 2141 - RNA, 19 nt, synthetic construct
  source 1..19: mol_type = other RNA
agcaggaggaggaggagga

SEQ ID NO: 2142 - RNA, 19 nt, synthetic construct
  source 1..19: mol_type = other RNA
cagcaggaggaggaggagg

SEQ ID NO: 2143 - RNA, 19 nt, synthetic construct
  source 1..19: mol_type = other RNA
gcagcaggaggaggaggag

SEQ ID NO: 2144 - RNA, 19 nt, synthetic construct
  source 1..19: mol_type = other RNA
agcagcaggaggaggagga

SEQ ID NO: 2145 - RNA, 19 nt, synthetic construct
  source 1..19: mol_type = other RNA
cagcagcaggaggaggagg

SEQ ID NO: 2146 - RNA, 19 nt, synthetic construct
  source 1..19: mol_type = other RNA
gcagcagcaggaggaggag

SEQ ID NO: 2147 - RNA, 19 nt, synthetic construct
  source 1..19: mol_type = other RNA
agcagcagcaggaggagga

SEQ ID NO: 2148 - RNA, 19 nt, synthetic construct
  source 1..19: mol_type = other RNA
cagcagcagcaggaggagg

SEQ ID NO: 2149 - RNA, 19 nt, synthetic construct
  source 1..19: mol_type = other RNA
gcagcagcagcaggaggag

SEQ ID NO: 2150 - RNA, 19 nt, synthetic construct
  source 1..19: mol_type = other RNA
agcagcagcagcaggagga

SEQ ID NO: 2151 - RNA, 19 nt, synthetic construct
  source 1..19: mol_type = other RNA
cagcagcagcagcaggagg

SEQ ID NO: 2152 - RNA, 19 nt, synthetic construct
  source 1..19: mol_type = other RNA
gcagcagcagcagcaggag

SEQ ID NO: 2153 - RNA, 19 nt, synthetic construct
  source 1..19: mol_type = other RNA
agcagcagcagcagcagga

SEQ ID NO: 2154 - RNA, 19 nt, synthetic construct
  source 1..19: mol_type = other RNA
cagcagcagcagcagcagg

SEQ ID NO: 2155 - RNA, 19 nt, synthetic construct
  source 1..19: mol_type = other RNA
gcagcagcagcagcagcag

SEQ ID NO: 2156 - RNA, 19 nt, synthetic construct
  source 1..19: mol_type = other RNA
ggcagcagcagcagcagca

SEQ ID NO: 2157 - RNA, 19 nt, synthetic construct
  source 1..19: mol_type = other RNA
tggcagcagcagcagcagc

SEQ ID NO: 2158 - RNA, 19 nt, synthetic construct
  source 1..19: mol_type = other RNA
gtggcagcagcagcagcag

SEQ ID NO: 2159 - RNA, 19 nt, synthetic construct
  source 1..19: mol_type = other RNA
cgtggcagcagcagcagca

SEQ ID NO: 2160 - RNA, 19 nt, synthetic construct
  source 1..19: mol_type = other RNA
ccgtggcagcagcagcagc

SEQ ID NO: 2161 - RNA, 19 nt, synthetic construct
  source 1..19: mol_type = other RNA
cccgtggcagcagcagcag

SEQ ID NO: 2162 - RNA, 19 nt, synthetic construct
  source 1..19: mol_type = other RNA
ccccgtggcagcagcagca

SEQ ID NO: 2163 - RNA, 19 nt, synthetic construct
  source 1..19: mol_type = other RNA
cccccgtggcagcagcagc

SEQ ID NO: 2164 - RNA, 19 nt, synthetic construct
  source 1..19: mol_type = other RNA
acccccgtggcagcagcag

SEQ ID NO: 2165 - RNA, 19 nt, synthetic construct
  source 1..19: mol_type = other RNA
aacccccgtggcagcagca

SEQ ID NO: 2166 - RNA, 19 nt, synthetic construct
  source 1..19: mol_type = other RNA
gaacccccgtggcagcagc

SEQ ID NO: 2167 - RNA, 19 nt, synthetic construct
  source 1..19: mol_type = other RNA
ggaacccccgtggcagcag

SEQ ID NO: 2168 - RNA, 19 nt, synthetic construct
  source 1..19: mol_type = other RNA
tggaacccccgtggcagca

SEQ ID NO: 2169 - RNA, 19 nt, synthetic construct
  source 1..19: mol_type = other RNA
ctggaacccccgtggcagc

SEQ ID NO: 2170 - RNA, 19 nt, synthetic construct
  source 1..19: mol_type = other RNA
gctggaacccccgtggcag

SEQ ID NO: 2171 - RNA, 19 nt, synthetic construct
  source 1..19: mol_type = other RNA
ggctggaacccccgtggca

SEQ ID NO: 2172 - RNA, 19 nt, synthetic construct
  source 1..19: mol_type = other RNA
gggctggaacccccgtggc

SEQ ID NO: 2173 - RNA, 19 nt, synthetic construct
  source 1..19: mol_type = other RNA
ggggctggaacccccgtgg

SEQ ID NO: 2174 - RNA, 19 nt, synthetic construct
  source 1..19: mol_type = other RNA
tggggctggaacccccgtg

SEQ ID NO: 2175 - RNA, 19 nt, synthetic construct
  source 1..19: mol_type = other RNA
ctggggctggaacccccgt

SEQ ID NO: 2176 - RNA, 19 nt, synthetic construct
  source 1..19: mol_type = other RNA
gctggggctggaacccccg

SEQ ID NO: 2177 - RNA, 19 nt, synthetic construct
  source 1..19: mol_type = other RNA
ggctggggctggaaccccc

SEQ ID NO: 2178 - RNA, 19 nt, synthetic construct
  source 1..19: mol_type = other RNA
aggctggggctggaacccc

SEQ ID NO: 2179 - RNA, 19 nt, synthetic construct
  source 1..19: mol_type = other RNA
caggctggggctggaaccc

SEQ ID NO: 2180 - RNA, 19 nt, synthetic construct
  source 1..19: mol_type = other RNA
ccaggctggggctggaacc

SEQ ID NO: 2181 - RNA, 19 nt, synthetic construct
  source 1..19: mol_type = other RNA
gccaggctggggctggaac

SEQ ID NO: 2182 - RNA, 19 nt, synthetic construct
  source 1..19: mol_type = other RNA
cgccaggctggggctggaa

SEQ ID NO: 2183 - RNA, 19 nt, synthetic construct
  source 1..19: mol_type = other RNA
ccgccaggctggggctgga

SEQ ID NO: 2184 - RNA, 19 nt, synthetic construct
  source 1..19: mol_type = other RNA
cccgccaggctggggctgg

SEQ ID NO: 2185 - RNA, 19 nt, synthetic construct
  source 1..19: mol_type = other RNA
tcccgccaggctggggctg

SEQ ID NO: 2186 - RNA, 19 nt, synthetic construct
  source 1..19: mol_type = other RNA
ttcccgccaggctggggct

SEQ ID NO: 2187 - RNA, 19 nt, synthetic construct
  source 1..19: mol_type = other RNA
gttcccgccaggctggggc

SEQ ID NO: 2188 - RNA, 19 nt, synthetic construct
  source 1..19: mol_type = other RNA
ggttcccgccaggctgggg

SEQ ID NO: 2189 - RNA, 19 nt, synthetic construct
  source 1..19: mol_type = other RNA
cggttcccgccaggctggg

SEQ ID NO: 2190 - RNA, 19 nt, synthetic construct
  source 1..19: mol_type = other RNA
acggttcccgccaggctgg

SEQ ID NO: 2191 - RNA, 19 nt, synthetic construct
  source 1..19: mol_type = other RNA
tacggttcccgccaggctg

SEQ ID NO: 2192 - RNA, 19 nt, synthetic construct
  source 1..19: mol_type = other RNA
gtacggttcccgccaggct

SEQ ID NO: 2193 - RNA, 19 nt, synthetic construct
  source 1..19: mol_type = other RNA
cgtacggttcccgccaggc

SEQ ID NO: 2194 - RNA, 19 nt, synthetic construct
  source 1..19: mol_type = other RNA
ccgtacggttcccgccagg

SEQ ID NO: 2195 - RNA, 19 nt, synthetic construct
  source 1..19: mol_type = other RNA
tccgtacggttcccgccag

SEQ ID NO: 2196 - RNA, 19 nt, synthetic construct
  source 1..19: mol_type = other RNA
ctccgtacggttcccgcca

SEQ ID NO: 2197 - RNA, 19 nt, synthetic construct
  source 1..19: mol_type = other RNA
actccgtacggttcccgcc

SEQ ID NO: 2198 - RNA, 19 nt, synthetic construct
  source 1..19: mol_type = other RNA
gactccgtacggttcccgc

SEQ ID NO: 2199 - RNA, 19 nt, synthetic construct
  source 1..19: mol_type = other RNA
ggactccgtacggttcccg

SEQ ID NO: 2200 - RNA, 19 nt, synthetic construct
  source 1..19: mol_type = other RNA
gggactccgtacggttccc

SEQ ID NO: 2201 - RNA, 19 nt, synthetic construct
  source 1..19: mol_type = other RNA
ggggactccgtacggttcc

SEQ ID NO: 2202 - RNA, 19 nt, synthetic construct
  source 1..19: mol_type = other RNA
tggggactccgtacggttc

SEQ ID NO: 2203 - RNA, 19 nt, synthetic construct
  source 1..19: mol_type = other RNA
ctggggactccgtacggtt

SEQ ID NO: 2204 - RNA, 19 nt, synthetic construct
  source 1..19: mol_type = other RNA
tctggggactccgtacggt

SEQ ID NO: 2205 - RNA, 19 nt, synthetic construct
  source 1..19: mol_type = other RNA
ttctggggactccgtacgg

SEQ ID NO: 2206 - RNA, 19 nt, synthetic construct
  source 1..19: mol_type = other RNA
gttctggggactccgtacg

SEQ ID NO: 2207 - RNA, 19 nt, synthetic construct
  source 1..19: mol_type = other RNA
ggttctggggactccgtac

SEQ ID NO: 2208 - RNA, 19 nt, synthetic construct
  source 1..19: mol_type = other RNA
aggttctggggactccgta

SEQ ID NO: 2209 - RNA, 19 nt, synthetic construct
  source 1..19: mol_type = other RNA
taggttctggggactccgt

SEQ ID NO: 2210 - RNA, 19 nt, synthetic construct
  source 1..19: mol_type = other RNA
ttaggttctggggactccg

SEQ ID NO: 2211 - RNA, 19 nt, synthetic construct
  source 1..19: mol_type = other RNA
attaggttctggggactcc

SEQ ID NO: 2212 - RNA, 19 nt, synthetic construct
  source 1..19: mol_type = other RNA
cattaggttctggggactc

SEQ ID NO: 2213 - RNA, 19 nt, synthetic construct
  source 1..19: mol_type = other RNA
gcattaggttctggggact

SEQ ID NO: 2214 - RNA, 19 nt, synthetic construct
  source 1..19: mol_type = other RNA
ggcattaggttctggggac

SEQ ID NO: 2215 - RNA, 19 nt, synthetic construct
  source 1..19: mol_type = other RNA
tggcattaggttctgggga

SEQ ID NO: 2216 - RNA, 19 nt, synthetic construct
  source 1..19: mol_type = other RNA
gtggcattaggttctgggg

SEQ ID NO: 2217 - RNA, 19 nt, synthetic construct
  source 1..19: mol_type = other RNA
tgtggcattaggttctggg

SEQ ID NO: 2218 - RNA, 19 nt, synthetic construct
  source 1..19: mol_type = other RNA
ctgtggcattaggttctgg

SEQ ID NO: 2219 - RNA, 19 nt, synthetic construct
  source 1..19: mol_type = other RNA
gctgtggcattaggttctg

SEQ ID NO: 2220 - RNA, 19 nt, synthetic construct
  source 1..19: mol_type = other RNA
cgctgtggcattaggttct

SEQ ID NO: 2221 - RNA, 19 nt, synthetic construct
  source 1..19: mol_type = other RNA
tcgctgtggcattaggttc

SEQ ID NO: 2222 - RNA, 19 nt, synthetic construct
  source 1..19: mol_type = other RNA
gtcgctgtggcattaggtt

SEQ ID NO: 2223 - RNA, 19 nt, synthetic construct
  source 1..19: mol_type = other RNA
ggtcgctgtggcattaggt

SEQ ID NO: 2224 - RNA, 19 nt, synthetic construct
  source 1..19: mol_type = other RNA
gggtcgctgtggcattagg

SEQ ID NO: 2225 - RNA, 19 nt, synthetic construct
  source 1..19: mol_type = other RNA
ggggtcgctgtggcattag

SEQ ID NO: 2226 - RNA, 19 nt, synthetic construct
  source 1..19: mol_type = other RNA
aggggtcgctgtggcatta

SEQ ID NO: 2227 - RNA, 19 nt, synthetic construct
  source 1..19: mol_type = other RNA
caggggtcgctgtggcatt

SEQ ID NO: 2228 - RNA, 19 nt, synthetic construct
  source 1..19: mol_type = other RNA
gcaggggtcgctgtggcat

SEQ ID NO: 2229 - RNA, 19 nt, synthetic construct
  source 1..19: mol_type = other RNA
cgcaggggtcgctgtggca

SEQ ID NO: 2230 - RNA, 19 nt, synthetic construct
  source 1..19: mol_type = other RNA
tcgcaggggtcgctgtggc

SEQ ID NO: 2231 - RNA, 19 nt, synthetic construct
  source 1..19: mol_type = other RNA
atcgcaggggtcgctgtgg

SEQ ID NO: 2232 - RNA, 19 nt, synthetic construct
  source 1..19: mol_type = other RNA
gatcgcaggggtcgctgtg

SEQ ID NO: 2233 - RNA, 19 nt, synthetic construct
  source 1..19: mol_type = other RNA
ggatcgcaggggtcgctgt

SEQ ID NO: 2234 - RNA, 19 nt, synthetic construct
  source 1..19: mol_type = other RNA
gggatcgcaggggtcgctg

SEQ ID NO: 2235 - RNA, 19 nt, synthetic construct
  source 1..19: mol_type = other RNA
ggggatcgcaggggtcgct

SEQ ID NO: 2236 - RNA, 19 nt, synthetic construct
  source 1..19: mol_type = other RNA
tggggatcgcaggggtcgc

SEQ ID NO: 2237 - RNA, 19 nt, synthetic construct
  source 1..19: mol_type = other RNA
gtggggatcgcaggggtcg

SEQ ID NO: 2238 - RNA, 19 nt, synthetic construct
  source 1..19: mol_type = other RNA
agtggggatcgcaggggtc

SEQ ID NO: 2239 - RNA, 19 nt, synthetic construct
  source 1..19: mol_type = other RNA
tagtggggatcgcaggggt

SEQ ID NO: 2240 - RNA, 19 nt, synthetic construct
  source 1..19: mol_type = other RNA
atagtggggatcgcagggg

SEQ ID NO: 2241 - RNA, 19 nt, synthetic construct
  source 1..19: mol_type = other RNA
gatagtggggatcgcaggg

SEQ ID NO: 2242 - RNA, 19 nt, synthetic construct
  source 1..19: mol_type = other RNA
ggatagtggggatcgcagg

SEQ ID NO: 2243 - RNA, 19 nt, synthetic construct
  source 1..19: mol_type = other RNA
aggatagtggggatcgcag

SEQ ID NO: 2244 - RNA, 19 nt, synthetic construct
  source 1..19: mol_type = other RNA
caggatagtggggatcgca

SEQ ID NO: 2245 - RNA, 19 nt, synthetic construct
  source 1..19: mol_type = other RNA
ccaggatagtggggatcgc

SEQ ID NO: 2246 - RNA, 19 nt, synthetic construct
  source 1..19: mol_type = other RNA
accaggatagtggggatcg

SEQ ID NO: 2247 - RNA, 19 nt, synthetic construct
  source 1..19: mol_type = other RNA
caccaggatagtggggatc

SEQ ID NO: 2248 - RNA, 19 nt, synthetic construct
  source 1..19: mol_type = other RNA
tcaccaggatagtggggat

SEQ ID NO: 2249 - RNA, 19 nt, synthetic construct
  source 1..19: mol_type = other RNA
gtcaccaggatagtgggga

SEQ ID NO: 2250 - RNA, 19 nt, synthetic construct
  source 1..19: mol_type = other RNA
ggtcaccaggatagtgggg

SEQ ID NO: 2251 - RNA, 19 nt, synthetic construct
  source 1..19: mol_type = other RNA
aggtcaccaggatagtggg

SEQ ID NO: 2252 - RNA, 19 nt, synthetic construct
  source 1..19: mol_type = other RNA
gaggtcaccaggatagtgg

SEQ ID NO: 2253 - RNA, 19 nt, synthetic construct
  source 1..19: mol_type = other RNA
agaggtcaccaggatagtg

SEQ ID NO: 2254 - RNA, 19 nt, synthetic construct
  source 1..19: mol_type = other RNA
cagaggtcaccaggatagt

SEQ ID NO: 2255 - RNA, 19 nt, synthetic construct
  source 1..19: mol_type = other RNA
acagaggtcaccaggatag

SEQ ID NO: 2256 - RNA, 19 nt, synthetic construct
  source 1..19: mol_type = other RNA
cacagaggtcaccaggata

SEQ ID NO: 2257 - RNA, 19 nt, synthetic construct
  source 1..19: mol_type = other RNA
tcacagaggtcaccaggat

SEQ ID NO: 2258 - RNA, 19 nt, synthetic construct
  source 1..19: mol_type = other RNA
gtcacagaggtcaccagga

SEQ ID NO: 2259 - RNA, 19 nt, synthetic construct
  source 1..19: mol_type = other RNA
ggtcacagaggtcaccagg

SEQ ID NO: 2260 - RNA, 19 nt, synthetic construct
  source 1..19: mol_type = other RNA
aggtcacagaggtcaccag

SEQ ID NO: 2261 - RNA, 19 nt, synthetic construct
  source 1..19: mol_type = other RNA
gaggtcacagaggtcacca

SEQ ID NO: 2262 - RNA, 19 nt, synthetic construct
  source 1..19: mol_type = other RNA
agaggtcacagaggtcacc

SEQ ID NO: 2263 - RNA, 19 nt, synthetic construct
  source 1..19: mol_type = other RNA
cagaggtcacagaggtcac

SEQ ID NO: 2264 - RNA, 19 nt, synthetic construct
  source 1..19: mol_type = other RNA
tcagaggtcacagaggtca

SEQ ID NO: 2265 - RNA, 19 nt, synthetic construct
  source 1..19: mol_type = other RNA
ctcagaggtcacagaggtc

SEQ ID NO: 2266 - RNA, 19 nt, synthetic construct
  source 1..19: mol_type = other RNA
tctcagaggtcacagaggt

SEQ ID NO: 2267 - RNA, 19 nt, synthetic construct
  source 1..19: mol_type = other RNA
gtctcagaggtcacagagg

SEQ ID NO: 2268 - RNA, 19 nt, synthetic construct
  source 1..19: mol_type = other RNA
ggtctcagaggtcacagag

SEQ ID NO: 2269 - RNA, 19 nt, synthetic construct
  source 1..19: mol_type = other RNA
gggtctcagaggtcacaga

SEQ ID NO: 2270 - RNA, 19 nt, synthetic construct
  source 1..19: mol_type = other RNA
ggggtctcagaggtcacag

SEQ ID NO: 2271 - RNA, 19 nt, synthetic construct
  source 1..19: mol_type = other RNA
tggggtctcagaggtcaca

SEQ ID NO: 2272 - RNA, 19 nt, synthetic construct
  source 1..19: mol_type = other RNA
ctggggtctcagaggtcac

SEQ ID NO: 2273 - RNA, 19 nt, synthetic construct
  source 1..19: mol_type = other RNA
gctggggtctcagaggtca

SEQ ID NO: 2274 - RNA, 19 nt, synthetic construct
  source 1..19: mol_type = other RNA
tgctggggtctcagaggtc

SEQ ID NO: 2275 - RNA, 19 nt, synthetic construct
  source 1..19: mol_type = other RNA
ttgctggggtctcagaggt

SEQ ID NO: 2276 - RNA, 19 nt, synthetic construct
  source 1..19: mol_type = other RNA
gttgctggggtctcagagg

SEQ ID NO: 2277 - RNA, 19 nt, synthetic construct
  source 1..19: mol_type = other RNA
tgttgctggggtctcagag

SEQ ID NO: 2278 - RNA, 19 nt, synthetic construct
  source 1..19: mol_type = other RNA
ttgttgctggggtctcaga

SEQ ID NO: 2279 - RNA, 19 nt, synthetic construct
  source 1..19: mol_type = other RNA
cttgttgctggggtctcag

SEQ ID NO: 2280 - RNA, 19 nt, synthetic construct
  source 1..19: mol_type = other RNA
acttgttgctggggtctca

SEQ ID NO: 2281 - RNA, 19 nt, synthetic construct
  source 1..19: mol_type = other RNA
cacttgttgctggggtctc

SEQ ID NO: 2282 - RNA, 19 nt, synthetic construct
  source 1..19: mol_type = other RNA
gcacttgttgctggggtct

SEQ ID NO: 2283 - RNA, 19 nt, synthetic construct
  source 1..19: mol_type = other RNA
agcacttgttgctggggtc

SEQ ID NO: 2284 - RNA, 19 nt, synthetic construct
  source 1..19: mol_type = other RNA
gagcacttgttgctggggt

SEQ ID NO: 2285 - RNA, 19 nt, synthetic construct
  source 1..19: mol_type = other RNA
ggagcacttgttgctgggg

SEQ ID NO: 2286 - RNA, 19 nt, synthetic construct
  source 1..19: mol_type = other RNA
tggagcacttgttgctggg

SEQ ID NO: 2287 - RNA, 19 nt, synthetic construct
  source 1..19: mol_type = other RNA
ctggagcacttgttgctgg

SEQ ID NO: 2288 - RNA, 19 nt, synthetic construct
  source 1..19: mol_type = other RNA
tctggagcacttgttgctg

SEQ ID NO: 2289 - RNA, 19 nt, synthetic construct
  source 1..19: mol_type = other RNA
ctctggagcacttgttgct

SEQ ID NO: 2290 - RNA, 19 nt, synthetic construct
  source 1..19: mol_type = other RNA
cctctggagcacttgttgc

SEQ ID NO: 2291 - RNA, 19 nt, synthetic construct
  source 1..19: mol_type = other RNA
gcctctggagcacttgttg

SEQ ID NO: 2292 - RNA, 19 nt, synthetic construct
  source 1..19: mol_type = other RNA
tgcctctggagcacttgtt

SEQ ID NO: 2293 - RNA, 19 nt, synthetic construct
  source 1..19: mol_type = other RNA
ctgcctctggagcacttgt

SEQ ID NO: 2294 - RNA, 19 nt, synthetic construct
  source 1..19: mol_type = other RNA
tctgcctctggagcacttg

SEQ ID NO: 2295 - RNA, 19 nt, synthetic construct
  source 1..19: mol_type = other RNA
ctctgcctctggagcactt

SEQ ID NO: 2296 - RNA, 19 nt, synthetic construct
  source 1..19: mol_type = other RNA
cctctgcctctggagcact

SEQ ID NO: 2297 - RNA, 19 nt, synthetic construct
  source 1..19: mol_type = other RNA
ccctctgcctctggagcac

SEQ ID NO: 2298 - RNA, 19 nt, synthetic construct
  source 1..19: mol_type = other RNA
tccctctgcctctggagca

SEQ ID NO: 2299 - RNA, 19 nt, synthetic construct
  source 1..19: mol_type = other RNA
gtccctctgcctctggagc

SEQ ID NO: 2300 - RNA, 19 nt, synthetic construct
  source 1..19: mol_type = other RNA
ggtccctctgcctctggag

SEQ ID NO: 2301 - RNA, 19 nt, synthetic construct
  source 1..19: mol_type = other RNA
gggtccctctgcctctgga

SEQ ID NO: 2302 - RNA, 19 nt, synthetic construct
  source 1..19: mol_type = other RNA
ggggtccctctgcctctgg

SEQ ID NO: 2303 - RNA, 19 nt, synthetic construct
  source 1..19: mol_type = other RNA
tggggtccctctgcctctg

SEQ ID NO: 2304 - RNA, 19 nt, synthetic construct
  source 1..19: mol_type = other RNA
ttggggtccctctgcctct

SEQ ID NO: 2305 - RNA, 19 nt, synthetic construct
  source 1..19: mol_type = other RNA
tttggggtccctctgcctc

SEQ ID NO: 2306 - RNA, 19 nt, synthetic construct
  source 1..19: mol_type = other RNA
ctttggggtccctctgcct

SEQ ID NO: 2307 - RNA, 19 nt, synthetic construct
  source 1..19: mol_type = other RNA
actttggggtccctctgcc

SEQ ID NO: 2308 - RNA, 19 nt, synthetic construct
  source 1..19: mol_type = other RNA
cactttggggtccctctgc

SEQ ID NO: 2309 - RNA, 19 nt, synthetic construct
  source 1..19: mol_type = other RNA
ccactttggggtccctctg

SEQ ID NO: 2310 - RNA, 19 nt, synthetic construct
  source 1..19: mol_type = other RNA
cccactttggggtccctct

SEQ ID NO: 2311 - RNA, 19 nt, synthetic construct
  source 1..19: mol_type = other RNA
ccccactttggggtccctc

SEQ ID NO: 2312 - RNA, 19 nt, synthetic construct
  source 1..19: mol_type = other RNA
cccccactttggggtccct

SEQ ID NO: 2313 - RNA, 19 nt, synthetic construct
  source 1..19: mol_type = other RNA
ccccccactttggggtccc

SEQ ID NO: 2314 - RNA, 19 nt, synthetic construct
  source 1..19: mol_type = other RNA
gccccccactttggggtcc

SEQ ID NO: 2315 - RNA, 19 nt, synthetic construct
  source 1..19: mol_type = other RNA
agccccccactttggggtc

SEQ ID NO: 2316 - RNA, 19 nt, synthetic construct
  source 1..19: mol_type = other RNA
gagccccccactttggggt

SEQ ID NO: 2317 - RNA, 19 nt, synthetic construct
  source 1..19: mol_type = other RNA
ggagccccccactttgggg

SEQ ID NO: 2318 - RNA, 19 nt, synthetic construct
  source 1..19: mol_type = other RNA
gggagccccccactttggg

SEQ ID NO: 2319 - RNA, 19 nt, synthetic construct
  source 1..19: mol_type = other RNA
cgggagccccccactttgg

SEQ ID NO: 2320 - RNA, 19 nt, synthetic construct
  source 1..19: mol_type = other RNA
gcgggagccccccactttg

SEQ ID NO: 2321 - RNA, 19 nt, synthetic construct
  source 1..19: mol_type = other RNA
ggcgggagccccccacttt

SEQ ID NO: 2322 - RNA, 19 nt, synthetic construct
  source 1..19: mol_type = other RNA
gggcgggagccccccactt

SEQ ID NO: 2323 - RNA, 19 nt, synthetic construct
  source 1..19: mol_type = other RNA
ggggcgggagccccccact

SEQ ID NO: 2324 - RNA, 19 nt, synthetic construct
  source 1..19: mol_type = other RNA
gggggcgggagccccccac

SEQ ID NO: 2325 - RNA, 19 nt, synthetic construct
  source 1..19: mol_type = other RNA
cgggggcgggagcccccca

SEQ ID NO: 2326 - RNA, 19 nt, synthetic construct
  source 1..19: mol_type = other RNA
gcgggggcgggagcccccc

SEQ ID NO: 2327 - RNA, 19 nt, synthetic construct
  source 1..19: mol_type = other RNA
ggcgggggcgggagccccc

SEQ ID NO: 2328 - RNA, 19 nt, synthetic construct
  source 1..19: mol_type = other RNA
gggcgggggcgggagcccc

SEQ ID NO: 2329 - RNA, 19 nt, synthetic construct
  source 1..19: mol_type = other RNA
tgggcgggggcgggagccc

SEQ ID NO: 2330 - RNA, 19 nt, synthetic construct
  source 1..19: mol_type = other RNA
ctgggcgggggcgggagcc

SEQ ID NO: 2331 - RNA, 19 nt, synthetic construct
  source 1..19: mol_type = other RNA
cctgggcgggggcgggagc

SEQ ID NO: 2332 - RNA, 19 nt, synthetic construct
  source 1..19: mol_type = other RNA
ccctgggcgggggcgggag

SEQ ID NO: 2333 - RNA, 19 nt, synthetic construct
  source 1..19: mol_type = other RNA
gccctgggcgggggcggga

SEQ ID NO: 2334 - RNA, 19 nt, synthetic construct
  source 1..19: mol_type = other RNA
tgccctgggcgggggcggg

SEQ ID NO: 2335 - RNA, 19 nt, synthetic construct
  source 1..19: mol_type = other RNA
ctgccctgggcgggggcgg

SEQ ID NO: 2336 - RNA, 19 nt, synthetic construct
  source 1..19: mol_type = other RNA
actgccctgggcgggggcg

SEQ ID NO: 2337 - RNA, 19 nt, synthetic construct
  source 1..19: mol_type = other RNA
aactgccctgggcgggggc

SEQ ID NO: 2338 - RNA, 19 nt, synthetic construct
  source 1..19: mol_type = other RNA
gaactgccctgggcggggg

SEQ ID NO: 2339 - RNA, 19 nt, synthetic construct
  source 1..19: mol_type = other RNA
ggaactgccctgggcgggg

SEQ ID NO: 2340 - RNA, 19 nt, synthetic construct
  source 1..19: mol_type = other RNA
gggaactgccctgggcggg

SEQ ID NO: 2341 - RNA, 19 nt, synthetic construct
  source 1..19: mol_type = other RNA
agggaactgccctgggcgg

SEQ ID NO: 2342 - RNA, 19 nt, synthetic construct
  source 1..19: mol_type = other RNA
gagggaactgccctgggcg

SEQ ID NO: 2343 - RNA, 19 nt, synthetic construct
  source 1..19: mol_type = other RNA
cgagggaactgccctgggc

SEQ ID NO: 2344 - RNA, 19 nt, synthetic construct
  source 1..19: mol_type = other RNA
tcgagggaactgccctggg

SEQ ID NO: 2345 - RNA, 19 nt, synthetic construct
  source 1..19: mol_type = other RNA
ctcgagggaactgccctgg

SEQ ID NO: 2346 - RNA, 19 nt, synthetic construct
  source 1..19: mol_type = other RNA
gctcgagggaactgccctg

SEQ ID NO: 2347 - RNA, 19 nt, synthetic construct
  source 1..19: mol_type = other RNA
tgctcgagggaactgccct

SEQ ID NO: 2348 - RNA, 19 nt, synthetic construct
  source 1..19: mol_type = other RNA
ctgctcgagggaactgccc

SEQ ID NO: 2349 - RNA, 19 nt, synthetic construct
  source 1..19: mol_type = other RNA
actgctcgagggaactgcc

SEQ ID NO: 2350 - RNA, 19 nt, synthetic construct
  source 1..19: mol_type = other RNA
tactgctcgagggaactgc

SEQ ID NO: 2351 - RNA, 19 nt, synthetic construct
  source 1..19: mol_type = other RNA
ctactgctcgagggaactg

SEQ ID NO: 2352 - RNA, 19 nt, synthetic construct
  source 1..19: mol_type = other RNA
gctactgctcgagggaact

SEQ ID NO: 2353 - RNA, 19 nt, synthetic construct
  source 1..19: mol_type = other RNA
ggctactgctcgagggaac

SEQ ID NO: 2354 - RNA, 19 nt, synthetic construct
  source 1..19: mol_type = other RNA
gggctactgctcgagggaa

SEQ ID NO: 2355 - RNA, 19 nt, synthetic construct
  source 1..19: mol_type = other RNA
ggggctactgctcgaggga

SEQ ID NO: 2356 - RNA, 19 nt, synthetic construct
  source 1..19: mol_type = other RNA
gggggctactgctcgaggg

SEQ ID NO: 2357 - RNA, 19 nt, synthetic construct
  source 1..19: mol_type = other RNA
tgggggctactgctcgagg

SEQ ID NO: 2358 - RNA, 19 nt, synthetic construct
  source 1..19: mol_type = other RNA
ctgggggctactgctcgag

SEQ ID NO: 2359 - RNA, 19 nt, synthetic construct
  source 1..19: mol_type = other RNA
cctgggggctactgctcga

SEQ ID NO: 2360 - RNA, 19 nt, synthetic construct
  source 1..19: mol_type = other RNA
gcctgggggctactgctcg

SEQ ID NO: 2361 - RNA, 19 nt, synthetic construct
  source 1..19: mol_type = other RNA
ggcctgggggctactgctc

SEQ ID NO: 2362 - RNA, 19 nt, synthetic construct
  source 1..19: mol_type = other RNA
gggcctgggggctactgct

SEQ ID NO: 2363 - RNA, 19 nt, synthetic construct
  source 1..19: mol_type = other RNA
tgggcctgggggctactgc

SEQ ID NO: 2364 - RNA, 19 nt, synthetic construct
  source 1..19: mol_type = other RNA
ttgggcctgggggctactg

SEQ ID NO: 2365 - RNA, 19 nt, synthetic construct
  source 1..19: mol_type = other RNA
cttgggcctgggggctact

SEQ ID NO: 2366 - RNA, 19 nt, synthetic construct
  source 1..19: mol_type = other RNA
gcttgggcctgggggctac

SEQ ID NO: 2367 - RNA, 19 nt, synthetic construct
  source 1..19: mol_type = other RNA
tgcttgggcctgggggcta

SEQ ID NO: 2368 - RNA, 19 nt, synthetic construct
  source 1..19: mol_type = other RNA
gtgcttgggcctgggggct

SEQ ID NO: 2369 - RNA, 19 nt, synthetic construct
  source 1..19: mol_type = other RNA
agtgcttgggcctgggggc

SEQ ID NO: 2370 - RNA, 19 nt, synthetic construct
  source 1..19: mol_type = other RNA
gagtgcttgggcctggggg

SEQ ID NO: 2371 - RNA, 19 nt, synthetic construct
  source 1..19: mol_type = other RNA
tgagtgcttgggcctgggg

SEQ ID NO: 2372 - RNA, 19 nt, synthetic construct
  source 1..19: mol_type = other RNA
gtgagtgcttgggcctggg

SEQ ID NO: 2373 - RNA, 19 nt, synthetic construct
  source 1..19: mol_type = other RNA
ggtgagtgcttgggcctgg

SEQ ID NO: 2374 - RNA, 19 nt, synthetic construct
  source 1..19: mol_type = other RNA
cggtgagtgcttgggcctg

SEQ ID NO: 2375 - RNA, 19 nt, synthetic construct
  source 1..19: mol_type = other RNA
tcggtgagtgcttgggcct

SEQ ID NO: 2376 - RNA, 19 nt, synthetic construct
  source 1..19: mol_type = other RNA
ctcggtgagtgcttgggcc

SEQ ID NO: 2377 - RNA, 19 nt, synthetic construct
  source 1..19: mol_type = other RNA
cctcggtgagtgcttgggc

SEQ ID NO: 2378 - DNA, 19 bp, synthetic construct
  source 1..19: mol_type = other DNA
tcctcggtgagtgcttggg

SEQ ID NO: 2379 - RNA, 19 nt, synthetic construct
  source 1..19: mol_type = other RNA
gtcctcggtgagtgcttgg

SEQ ID NO: 2380 - RNA, 19 nt, synthetic construct
  source 1..19: mol_type = other RNA
cgtcctcggtgagtgcttg

SEQ ID NO: 2381 - RNA, 19 nt, synthetic construct
  source 1..19: mol_type = other RNA
ccgtcctcggtgagtgctt

SEQ ID NO: 2382 - RNA, 19 nt, synthetic construct
  source 1..19: mol_type = other RNA
cccgtcctcggtgagtgct

SEQ ID NO: 2383 - RNA, 19 nt, synthetic construct
  source 1..19: mol_type = other RNA
tcccgtcctcggtgagtgc

SEQ ID NO: 2384 - RNA, 19 nt, synthetic construct
  source 1..19: mol_type = other RNA
ctcccgtcctcggtgagtg

SEQ ID NO: 2385 - RNA, 19 nt, synthetic construct
  source 1..19: mol_type = other RNA
cctcccgtcctcggtgagt

SEQ ID NO: 2386 - RNA, 19 nt, synthetic construct
  source 1..19: mol_type = other RNA
gcctcccgtcctcggtgag

SEQ ID NO: 2387 - RNA, 19 nt, synthetic construct
  source 1..19: mol_type = other RNA
ggcctcccgtcctcggtga

SEQ ID NO: 2388 - RNA, 19 nt, synthetic construct
  source 1..19: mol_type = other RNA
gggcctcccgtcctcggtg

SEQ ID NO: 2389 - RNA, 19 nt, synthetic construct
  source 1..19: mol_type = other RNA
agggcctcccgtcctcggt

SEQ ID NO: 2390 - RNA, 19 nt, synthetic construct
  source 1..19: mol_type = other RNA
cagggcctcccgtcctcgg

SEQ ID NO: 2391 - RNA, 19 nt, synthetic construct
  source 1..19: mol_type = other RNA
gcagggcctcccgtcctcg

SEQ ID NO: 2392 - RNA, 19 nt, synthetic construct
  source 1..19: mol_type = other RNA
tgcagggcctcccgtcctc

SEQ ID NO: 2393 - RNA, 19 nt, synthetic construct
  source 1..19: mol_type = other RNA
ctgcagggcctcccgtcct

SEQ ID NO: 2394 - RNA, 19 nt, synthetic construct
  source 1..19: mol_type = other RNA
cctgcagggcctcccgtcc

SEQ ID NO: 2395 - RNA, 19 nt, synthetic construct
  source 1..19: mol_type = other RNA
acctgcagggcctcccgtc

SEQ ID NO: 2396 - RNA, 19 nt, synthetic construct
  source 1..19: mol_type = other RNA
aacctgcagggcctcccgt

SEQ ID NO: 2397 - RNA, 19 nt, synthetic construct
  source 1..19: mol_type = other RNA
gaacctgcagggcctcccg

SEQ ID NO: 2398 - RNA, 19 nt, synthetic construct
  source 1..19: mol_type = other RNA
ggaacctgcagggcctccc

SEQ ID NO: 2399 - RNA, 19 nt, synthetic construct
  source 1..19: mol_type = other RNA
gggaacctgcagggcctcc

SEQ ID NO: 2400 - RNA, 19 nt, synthetic construct
  source 1..19: mol_type = other RNA
ggggaacctgcagggcctc

SEQ ID NO: 2401 - RNA, 19 nt, synthetic construct
  source 1..19: mol_type = other RNA
aggggaacctgcagggcct

SEQ ID NO: 2402 - RNA, 19 nt, synthetic construct
  source 1..19: mol_type = other RNA
aaggggaacctgcagggcc

SEQ ID NO: 2403 - RNA, 19 nt, synthetic construct
  source 1..19: mol_type = other RNA
gaaggggaacctgcagggc

SEQ ID NO: 2404 - RNA, 19 nt, synthetic construct
  source 1..19: mol_type = other RNA
ggaaggggaacctgcaggg

SEQ ID NO: 2405 - RNA, 19 nt, synthetic construct
  source 1..19: mol_type = other RNA
cggaaggggaacctgcagg

SEQ ID NO: 2406 - RNA, 19 nt, synthetic construct
  source 1..19: mol_type = other RNA
gcggaaggggaacctgcag

SEQ ID NO: 2407 - RNA, 19 nt, synthetic construct
  source 1..19: mol_type = other RNA
agcggaaggggaacctgca

SEQ ID NO: 2408 - RNA, 19 nt, synthetic construct
  source 1..19: mol_type = other RNA
tagcggaaggggaacctgc

SEQ ID NO: 2409 - RNA, 19 nt, synthetic construct
  source 1..19: mol_type = other RNA
gtagcggaaggggaacctg

SEQ ID NO: 2410 - RNA, 19 nt, synthetic construct
  source 1..19: mol_type = other RNA
cgtagcggaaggggaacct

SEQ ID NO: 2411 - RNA, 19 nt, synthetic construct
  source 1..19: mol_type = other RNA
ccgtagcggaaggggaacc

SEQ ID NO: 2412 - RNA, 19 nt, synthetic construct
  source 1..19: mol_type = other RNA
cccgtagcggaaggggaac

SEQ ID NO: 2413 - RNA, 19 nt, synthetic construct
  source 1..19: mol_type = other RNA
ccccgtagcggaaggggaa

SEQ ID NO: 2414 - RNA, 19 nt, synthetic construct
  source 1..19: mol_type = other RNA
cccccgtagcggaagggga

SEQ ID NO: 2415 - RNA, 19 nt, synthetic construct
  source 1..19: mol_type = other RNA
gcccccgtagcggaagggg

SEQ ID NO: 2416 - RNA, 19 nt, synthetic construct
  source 1..19: mol_type = other RNA
ggcccccgtagcggaaggg

SEQ ID NO: 2417 - RNA, 19 nt, synthetic construct
  source 1..19: mol_type = other RNA
cggcccccgtagcggaagg

SEQ ID NO: 2418 - RNA, 19 nt, synthetic construct
  source 1..19: mol_type = other RNA
gcggcccccgtagcggaag

SEQ ID NO: 2419 - RNA, 19 nt, synthetic construct
  source 1..19: mol_type = other RNA
tgcggcccccgtagcggaa

SEQ ID NO: 2420 - RNA, 19 nt, synthetic construct
  source 1..19: mol_type = other RNA
atgcggcccccgtagcgga

SEQ ID NO: 2421 - RNA, 19 nt, synthetic construct
  source 1..19: mol_type = other RNA
catgcggcccccgtagcgg

SEQ ID NO: 2422 - RNA, 19 nt, synthetic construct
  source 1..19: mol_type = other RNA
gcatgcggcccccgtagcg

SEQ ID NO: 2423 - RNA, 19 nt, synthetic construct
  source 1..19: mol_type = other RNA
agcatgcggcccccgtagc

SEQ ID NO: 2424 - RNA, 19 nt, synthetic construct
  source 1..19: mol_type = other RNA
cagcatgcggcccccgtag

SEQ ID NO: 2425 - RNA, 19 nt, synthetic construct
  source 1..19: mol_type = other RNA
gcagcatgcggcccccgta

SEQ ID NO: 2426 - RNA, 19 nt, synthetic construct
  source 1..19: mol_type = other RNA
tgcagcatgcggcccccgt

SEQ ID NO: 2427 - RNA, 19 nt, synthetic construct
  source 1..19: mol_type = other RNA
atgcagcatgcggcccccg

SEQ ID NO: 2428 - RNA, 19 nt, synthetic construct
  source 1..19: mol_type = other RNA
catgcagcatgcggccccc

SEQ ID NO: 2429 - RNA, 19 nt, synthetic construct
  source 1..19: mol_type = other RNA
gcatgcagcatgcggcccc

SEQ ID NO: 2430 - RNA, 19 nt, synthetic construct
  source 1..19: mol_type = other RNA
ggcatgcagcatgcggccc

SEQ ID NO: 2431 - RNA, 19 nt, synthetic construct
  source 1..19: mol_type = other RNA
aggcatgcagcatgcggcc

SEQ ID NO: 2432 - RNA, 19 nt, synthetic construct
  source 1..19: mol_type = other RNA
caggcatgcagcatgcggc

SEQ ID NO: 2433 - RNA, 19 nt, synthetic construct
  source 1..19: mol_type = other RNA
gcaggcatgcagcatgcgg

SEQ ID NO: 2434 - RNA, 19 nt, synthetic construct
  source 1..19: mol_type = other RNA
tgcaggcatgcagcatgcg

SEQ ID NO: 2435 - RNA, 19 nt, synthetic construct
  source 1..19: mol_type = other RNA
gtgcaggcatgcagcatgc

SEQ ID NO: 2436 - RNA, 19 nt, synthetic construct
  source 1..19: mol_type = other RNA
agtgcaggcatgcagcatg

SEQ ID NO: 2437 - RNA, 19 nt, synthetic construct
  source 1..19: mol_type = other RNA
aagtgcaggcatgcagcat

SEQ ID NO: 2438 - RNA, 19 nt, synthetic construct
  source 1..19: mol_type = other RNA
gaagtgcaggcatgcagca

SEQ ID NO: 2439 - RNA, 19 nt, synthetic construct
  source 1..19: mol_type = other RNA
cgaagtgcaggcatgcagc

SEQ ID NO: 2440 - RNA, 19 nt, synthetic construct
  source 1..19: mol_type = other RNA
ccgaagtgcaggcatgcag

SEQ ID NO: 2441 - RNA, 19 nt, synthetic construct
  source 1..19: mol_type = other RNA
tccgaagtgcaggcatgca

SEQ ID NO: 2442 - RNA, 19 nt, synthetic construct
  source 1..19: mol_type = other RNA
ctccgaagtgcaggcatgc

SEQ ID NO: 2443 - RNA, 19 nt, synthetic construct
  source 1..19: mol_type = other RNA
cctccgaagtgcaggcatg

SEQ ID NO: 2444 - RNA, 19 nt, synthetic construct
  source 1..19: mol_type = other RNA
ccctccgaagtgcaggcat

SEQ ID NO: 2445 - RNA, 19 nt, synthetic construct
  source 1..19: mol_type = other RNA
gccctccgaagtgcaggca

SEQ ID NO: 2446 - RNA, 19 nt, synthetic construct
  source 1..19: mol_type = other RNA
tgccctccgaagtgcaggc

SEQ ID NO: 2447 - RNA, 19 nt, synthetic construct
  source 1..19: mol_type = other RNA
ctgccctccgaagtgcagg

SEQ ID NO: 2448 - RNA, 19 nt, synthetic construct
  source 1..19: mol_type = other RNA
actgccctccgaagtgcag

SEQ ID NO: 2449 - RNA, 19 nt, synthetic construct
  source 1..19: mol_type = other RNA
cactgccctccgaagtgca

SEQ ID NO: 2450 - RNA, 19 nt, synthetic construct
  source 1..19: mol_type = other RNA
gcactgccctccgaagtgc

SEQ ID NO: 2451 - RNA, 19 nt, synthetic construct
  source 1..19: mol_type = other RNA
tgcactgccctccgaagtg

SEQ ID NO: 2452 - RNA, 19 nt, synthetic construct
  source 1..19: mol_type = other RNA
gtgcactgccctccgaagt

SEQ ID NO: 2453 - RNA, 19 nt, synthetic construct
  source 1..19: mol_type = other RNA
tgtgcactgccctccgaag

SEQ ID NO: 2454 - RNA, 19 nt, synthetic construct
  source 1..19: mol_type = other RNA
gtgtgcactgccctccgaa

SEQ ID NO: 2455 - RNA, 19 nt, synthetic construct
  source 1..19: mol_type = other RNA
tgtgtgcactgccctccga

SEQ ID NO: 2456 - RNA, 19 nt, synthetic construct
  source 1..19: mol_type = other RNA
ctgtgtgcactgccctccg

SEQ ID NO: 2457 - RNA, 19 nt, synthetic construct
  source 1..19: mol_type = other RNA
cctgtgtgcactgccctcc

SEQ ID NO: 2458 - RNA, 19 nt, synthetic construct
  source 1..19: mol_type = other RNA
tcctgtgtgcactgccctc

SEQ ID NO: 2459 - RNA, 19 nt, synthetic construct
  source 1..19: mol_type = other RNA
ttcctgtgtgcactgccct

SEQ ID NO: 2460 - RNA, 19 nt, synthetic construct
  source 1..19: mol_type = other RNA
cttcctgtgtgcactgccc

SEQ ID NO: 2461 - RNA, 19 nt, synthetic construct
  source 1..19: mol_type = other RNA
acttcctgtgtgcactgcc

SEQ ID NO: 2462 - RNA, 19 nt, synthetic construct
  source 1..19: mol_type = other RNA
cacttcctgtgtgcactgc

SEQ ID NO: 2463 - RNA, 19 nt, synthetic construct
  source 1..19: mol_type = other RNA
ccacttcctgtgtgcactg

SEQ ID NO: 2464 - RNA, 19 nt, synthetic construct
  source 1..19: mol_type = other RNA
accacttcctgtgtgcact

SEQ ID NO: 2465 - RNA, 19 nt, synthetic construct
  source 1..19: mol_type = other RNA
caccacttcctgtgtgcac

SEQ ID NO: 2466 - RNA, 19 nt, synthetic construct
  source 1..19: mol_type = other RNA
acaccacttcctgtgtgca

SEQ ID NO: 2467 - RNA, 19 nt, synthetic construct
  source 1..19: mol_type = other RNA
cacaccacttcctgtgtgc

SEQ ID NO: 2468 - RNA, 19 nt, synthetic construct
  source 1..19: mol_type = other RNA
gcacaccacttcctgtgtg

SEQ ID NO: 2469 - RNA, 19 nt, synthetic construct
  source 1..19: mol_type = other RNA
ggcacaccacttcctgtgt

SEQ ID NO: 2470 - RNA, 19 nt, synthetic construct
  source 1..19: mol_type = other RNA
tggcacaccacttcctgtg

SEQ ID NO: 2471 - RNA, 19 nt, synthetic construct
  source 1..19: mol_type = other RNA
gtggcacaccacttcctgt

SEQ ID NO: 2472 - RNA, 19 nt, synthetic construct
  source 1..19: mol_type = other RNA
tgtggcacaccacttcctg

SEQ ID NO: 2473 - RNA, 19 nt, synthetic construct
  source 1..19: mol_type = other RNA
ttgtggcacaccacttcct

SEQ ID NO: 2474 - RNA, 19 nt, synthetic construct
  source 1..19: mol_type = other RNA
gttgtggcacaccacttcc

SEQ ID NO: 2475 - RNA, 19 nt, synthetic construct
  source 1..19: mol_type = other RNA
agttgtggcacaccacttc

SEQ ID NO: 2476 - RNA, 19 nt, synthetic construct
  source 1..19: mol_type = other RNA
gagttgtggcacaccactt

SEQ ID NO: 2477 - RNA, 19 nt, synthetic construct
  source 1..19: mol_type = other RNA
tgagttgtggcacaccact

SEQ ID NO: 2478 - RNA, 19 nt, synthetic construct
  source 1..19: mol_type = other RNA
gtgagttgtggcacaccac

SEQ ID NO: 2479 - RNA, 19 nt, synthetic construct
  source 1..19: mol_type = other RNA
tgtgagttgtggcacacca

SEQ ID NO: 2480 - RNA, 19 nt, synthetic construct
  source 1..19: mol_type = other RNA
ttgtgagttgtggcacacc

SEQ ID NO: 2481 - RNA, 19 nt, synthetic construct
  source 1..19: mol_type = other RNA
gttgtgagttgtggcacac

SEQ ID NO: 2482 - RNA, 19 nt, synthetic construct
  source 1..19: mol_type = other RNA
agttgtgagttgtggcaca

SEQ ID NO: 2483 - RNA, 19 nt, synthetic construct
  source 1..19: mol_type = other RNA
tagttgtgagttgtggcac

SEQ ID NO: 2484 - RNA, 19 nt, synthetic construct
  source 1..19: mol_type = other RNA
gtagttgtgagttgtggca

SEQ ID NO: 2485 - RNA, 19 nt, synthetic construct
  source 1..19: mol_type = other RNA
cgtagttgtgagttgtggc

SEQ ID NO: 2486 - RNA, 19 nt, synthetic construct
  source 1..19: mol_type = other RNA
tcgtagttgtgagttgtgg

SEQ ID NO: 2487 - RNA, 19 nt, synthetic construct
  source 1..19: mol_type = other RNA
gtcgtagttgtgagttgtg

SEQ ID NO: 2488 - RNA, 19 nt, synthetic construct
  source 1..19: mol_type = other RNA
ggtcgtagttgtgagttgt

SEQ ID NO: 2489 - RNA, 19 nt, synthetic construct
  source 1..19: mol_type = other RNA
cggtcgtagttgtgagttg

SEQ ID NO: 2490 - RNA, 19 nt, synthetic construct
  source 1..19: mol_type = other RNA
ccggtcgtagttgtgagtt

SEQ ID NO: 2491 - RNA, 19 nt, synthetic construct
  source 1..19: mol_type = other RNA
cccggtcgtagttgtgagt

SEQ ID NO: 2492 - RNA, 19 nt, synthetic construct
  source 1..19: mol_type = other RNA
tcccggtcgtagttgtgag

SEQ ID NO: 2493 - RNA, 19 nt, synthetic construct
  source 1..19: mol_type = other RNA
gtcccggtcgtagttgtga

SEQ ID NO: 2494 - RNA, 19 nt, synthetic construct
  source 1..19: mol_type = other RNA
tgtcccggtcgtagttgtg

SEQ ID NO: 2495 - RNA, 19 nt, synthetic construct
  source 1..19: mol_type = other RNA
ctgtcccggtcgtagttgt

SEQ ID NO: 2496 - RNA, 19 nt, synthetic construct
  source 1..19: mol_type = other RNA
cctgtcccggtcgtagttg

SEQ ID NO: 2497 - RNA, 19 nt, synthetic construct
  source 1..19: mol_type = other RNA
ccctgtcccggtcgtagtt

SEQ ID NO: 2498 - RNA, 19 nt, synthetic construct
  source 1..19: mol_type = other RNA
gccctgtcccggtcgtagt

SEQ ID NO: 2499 - RNA, 19 nt, synthetic construct
  source 1..19: mol_type = other RNA
ggccctgtcccggtcgtag

SEQ ID NO: 2500 - RNA, 19 nt, synthetic construct
  source 1..19: mol_type = other RNA
aggccctgtcccggtcgta

SEQ ID NO: 2501 - RNA, 19 nt, synthetic construct
  source 1..19: mol_type = other RNA
caggccctgtcccggtcgt

SEQ ID NO: 2502 - RNA, 19 nt, synthetic construct
  source 1..19: mol_type = other RNA
ccaggccctgtcccggtcg

SEQ ID NO: 2503 - RNA, 19 nt, synthetic construct
  source 1..19: mol_type = other RNA
cccaggccctgtcccggtc

SEQ ID NO: 2504 - RNA, 19 nt, synthetic construct
  source 1..19: mol_type = other RNA
ccccaggccctgtcccggt

SEQ ID NO: 2505 - RNA, 19 nt, synthetic construct
  source 1..19: mol_type = other RNA
gccccaggccctgtcccgg

SEQ ID NO: 2506 - RNA, 19 nt, synthetic construct
  source 1..19: mol_type = other RNA
agccccaggccctgtcccg

SEQ ID NO: 2507 - RNA, 19 nt, synthetic construct
  source 1..19: mol_type = other RNA
tagccccaggccctgtccc

SEQ ID NO: 2508 - RNA, 19 nt, synthetic construct
  source 1..19: mol_type = other RNA
gtagccccaggccctgtcc

SEQ ID NO: 2509 - RNA, 19 nt, synthetic construct
  source 1..19: mol_type = other RNA
agtagccccaggccctgtc

SEQ ID NO: 2510 - RNA, 19 nt, synthetic construct
  source 1..19: mol_type = other RNA
cagtagccccaggccctgt

SEQ ID NO: 2511 - RNA, 19 nt, synthetic construct
  source 1..19: mol_type = other RNA
acagtagccccaggccctg

SEQ ID NO: 2512 - RNA, 19 nt, synthetic construct
  source 1..19: mol_type = other RNA
cacagtagccccaggccct

SEQ ID NO: 2513 - RNA, 19 nt, synthetic construct
  source 1..19: mol_type = other RNA
acacagtagccccaggccc

SEQ ID NO: 2514 - RNA, 19 nt, synthetic construct
  source 1..19: mol_type = other RNA
cacacagtagccccaggcc

SEQ ID NO: 2515 - RNA, 19 nt, synthetic construct
  source 1..19: mol_type = other RNA
ccacacagtagccccaggc

SEQ ID NO: 2516 - RNA, 19 nt, synthetic construct
  source 1..19: mol_type = other RNA
tccacacagtagccccagg

SEQ ID NO: 2517 - RNA, 19 nt, synthetic construct
  source 1..19: mol_type = other RNA
ctccacacagtagccccag

SEQ ID NO: 2518 - RNA, 19 nt, synthetic construct
  source 1..19: mol_type = other RNA
cctccacacagtagcccca

SEQ ID NO: 2519 - RNA, 19 nt, synthetic construct
  source 1..19: mol_type = other RNA
gcctccacacagtagcccc

SEQ ID NO: 2520 - RNA, 19 nt, synthetic construct
  source 1..19: mol_type = other RNA
ggcctccacacagtagccc

SEQ ID NO: 2521 - RNA, 19 nt, synthetic construct
  source 1..19: mol_type = other RNA
tggcctccacacagtagcc

SEQ ID NO: 2522 - RNA, 19 nt, synthetic construct
  source 1..19: mol_type = other RNA
gtggcctccacacagtagc

SEQ ID NO: 2523 - RNA, 19 nt, synthetic construct
  source 1..19: mol_type = other RNA
ggtggcctccacacagtag

SEQ ID NO: 2524 - RNA, 19 nt, synthetic construct
  source 1..19: mol_type = other RNA
gggtggcctccacacagta

SEQ ID NO: 2525 - RNA, 19 nt, synthetic construct
  source 1..19: mol_type = other RNA
ggggtggcctccacacagt

SEQ ID NO: 2526 - RNA, 19 nt, synthetic construct
  source 1..19: mol_type = other RNA
cggggtggcctccacacag

SEQ ID NO: 2527 - RNA, 19 nt, synthetic construct
  source 1..19: mol_type = other RNA
gcggggtggcctccacaca

SEQ ID NO: 2528 - RNA, 19 nt, synthetic construct
  source 1..19: mol_type = other RNA
ggcggggtggcctccacac

SEQ ID NO: 2529 - RNA, 19 nt, synthetic construct
  source 1..19: mol_type = other RNA
aggcggggtggcctccaca

SEQ ID NO: 2530 - RNA, 19 nt, synthetic construct
  source 1..19: mol_type = other RNA
gaggcggggtggcctccac

SEQ ID NO: 2531 - RNA, 19 nt, synthetic construct
  source 1..19: mol_type = other RNA
ggaggcggggtggcctcca

SEQ ID NO: 2532 - RNA, 19 nt, synthetic construct
  source 1..19: mol_type = other RNA
tggaggcggggtggcctcc

SEQ ID NO: 2533 - RNA, 19 nt, synthetic construct
  source 1..19: mol_type = other RNA
ctggaggcggggtggcctc

SEQ ID NO: 2534 - RNA, 19 nt, synthetic construct
  source 1..19: mol_type = other RNA
cctggaggcggggtggcct

SEQ ID NO: 2535 - RNA, 19 nt, synthetic construct
  source 1..19: mol_type = other RNA
ccctggaggcggggtggcc

SEQ ID NO: 2536 - RNA, 19 nt, synthetic construct
  source 1..19: mol_type = other RNA
cccctggaggcggggtggc

SEQ ID NO: 2537 - RNA, 19 nt, synthetic construct
  source 1..19: mol_type = other RNA
ccccctggaggcggggtgg

SEQ ID NO: 2538 - RNA, 19 nt, synthetic construct
  source 1..19: mol_type = other RNA
gccccctggaggcggggtg

SEQ ID NO: 2539 - RNA, 19 nt, synthetic construct
  source 1..19: mol_type = other RNA
ggccccctggaggcggggt

SEQ ID NO: 2540 - RNA, 19 nt, synthetic construct
  source 1..19: mol_type = other RNA
gggccccctggaggcgggg

SEQ ID NO: 2541 - RNA, 19 nt, synthetic construct
  source 1..19: mol_type = other RNA
tgggccccctggaggcggg

SEQ ID NO: 2542 - RNA, 19 nt, synthetic construct
  source 1..19: mol_type = other RNA
ctgggccccctggaggcgg

SEQ ID NO: 2543 - RNA, 19 nt, synthetic construct
  source 1..19: mol_type = other RNA
gctgggccccctggaggcg

SEQ ID NO: 2544 - RNA, 19 nt, synthetic construct
  source 1..19: mol_type = other RNA
agctgggccccctggaggc

SEQ ID NO: 2545 - RNA, 19 nt, synthetic construct
  source 1..19: mol_type = other RNA
cagctgggccccctggagg

SEQ ID NO: 2546 - RNA, 19 nt, synthetic construct
  source 1..19: mol_type = other RNA
gcagctgggccccctggag

SEQ ID NO: 2547 - RNA, 19 nt, synthetic construct
  source 1..19: mol_type = other RNA
ggcagctgggccccctgga

SEQ ID NO: 2548 - RNA, 19 nt, synthetic construct
  source 1..19: mol_type = other RNA
gggcagctgggccccctgg

SEQ ID NO: 2549 - RNA, 19 nt, synthetic construct
  source 1..19: mol_type = other RNA
agggcagctgggccccctg

SEQ ID NO: 2550 - RNA, 19 nt, synthetic construct
  source 1..19: mol_type = other RNA
cagggcagctgggccccct

SEQ ID NO: 2551 - RNA, 19 nt, synthetic construct
  source 1..19: mol_type = other RNA
ccagggcagctgggccccc

SEQ ID NO: 2552 - RNA, 19 nt, synthetic construct
  source 1..19: mol_type = other RNA
tccagggcagctgggcccc

SEQ ID NO: 2553 - RNA, 19 nt, synthetic construct
  source 1..19: mol_type = other RNA
atccagggcagctgggccc

SEQ ID NO: 2554 - RNA, 19 nt, synthetic construct
  source 1..19: mol_type = other RNA
gatccagggcagctgggcc

SEQ ID NO: 2555 - RNA, 19 nt, synthetic construct
  source 1..19: mol_type = other RNA
ggatccagggcagctgggc

SEQ ID NO: 2556 - RNA, 19 nt, synthetic construct
  source 1..19: mol_type = other RNA
gggatccagggcagctggg

SEQ ID NO: 2557 - RNA, 19 nt, synthetic construct
  source 1..19: mol_type = other RNA
agggatccagggcagctgg

SEQ ID NO: 2558 - RNA, 19 nt, synthetic construct
  source 1..19: mol_type = other RNA
cagggatccagggcagctg

SEQ ID NO: 2559 - RNA, 19 nt, synthetic construct
  source 1..19: mol_type = other RNA
acagggatccagggcagct

SEQ ID NO: 2560 - RNA, 19 nt, synthetic construct
  source 1..19: mol_type = other RNA
cacagggatccagggcagc

SEQ ID NO: 2561 - RNA, 19 nt, synthetic construct
  source 1..19: mol_type = other RNA
gcacagggatccagggcag

SEQ ID NO: 2562 - RNA, 19 nt, synthetic construct
  source 1..19: mol_type = other RNA
ggcacagggatccagggca

SEQ ID NO: 2563 - RNA, 19 nt, synthetic construct
  source 1..19: mol_type = other RNA
aggcacagggatccagggc

SEQ ID NO: 2564 - RNA, 19 nt, synthetic construct
  source 1..19: mol_type = other RNA
gaggcacagggatccaggg

SEQ ID NO: 2565 - RNA, 19 nt, synthetic construct
  source 1..19: mol_type = other RNA
ggaggcacagggatccagg

SEQ ID NO: 2566 - RNA, 19 nt, synthetic construct
  source 1..19: mol_type = other RNA
cggaggcacagggatccag

SEQ ID NO: 2567 - RNA, 19 nt, synthetic construct
  source 1..19: mol_type = other RNA
ccggaggcacagggatcca

SEQ ID NO: 2568 - RNA, 19 nt, synthetic construct
  source 1..19: mol_type = other RNA
gccggaggcacagggatcc

SEQ ID NO: 2569 - RNA, 19 nt, synthetic construct
  source 1..19: mol_type = other RNA
ggccggaggcacagggatc

SEQ ID NO: 2570 - RNA, 19 nt, synthetic construct
  source 1..19: mol_type = other RNA
gggccggaggcacagggat

SEQ ID NO: 2571 - RNA, 19 nt, synthetic construct
  source 1..19: mol_type = other RNA
ggggccggaggcacaggga

SEQ ID NO: 2572 - RNA, 19 nt, synthetic construct
  source 1..19: mol_type = other RNA
aggggccggaggcacaggg

SEQ ID NO: 2573 - RNA, 19 nt, synthetic construct
  source 1..19: mol_type = other RNA
caggggccggaggcacagg

SEQ ID NO: 2574 - RNA, 19 nt, synthetic construct
  source 1..19: mol_type = other RNA
gcaggggccggaggcacag

SEQ ID NO: 2575 - RNA, 19 nt, synthetic construct
  source 1..19: mol_type = other RNA
ggcaggggccggaggcaca

SEQ ID NO: 2576 - RNA, 19 nt, synthetic construct
  source 1..19: mol_type = other RNA
aggcaggggccggaggcac

SEQ ID NO: 2577 - RNA, 19 nt, synthetic construct
  source 1..19: mol_type = other RNA
gaggcaggggccggaggca

SEQ ID NO: 2578 - RNA, 19 nt, synthetic construct
  source 1..19: mol_type = other RNA
tgaggcaggggccggaggc

SEQ ID NO: 2579 - RNA, 19 nt, synthetic construct
  source 1..19: mol_type = other RNA
ttgaggcaggggccggagg

SEQ ID NO: 2580 - RNA, 19 nt, synthetic construct
  source 1..19: mol_type = other RNA
attgaggcaggggccggag

SEQ ID NO: 2581 - RNA, 19 nt, synthetic construct
  source 1..19: mol_type = other RNA
cattgaggcaggggccgga

SEQ ID NO: 2582 - RNA, 19 nt, synthetic construct
  source 1..19: mol_type = other RNA
ccattgaggcaggggccgg

SEQ ID NO: 2583 - RNA, 19 nt, synthetic construct
  source 1..19: mol_type = other RNA
tccattgaggcaggggccg

SEQ ID NO: 2584 - RNA, 19 nt, synthetic construct
  source 1..19: mol_type = other RNA
ctccattgaggcaggggcc

SEQ ID NO: 2585 - RNA, 19 nt, synthetic construct
  source 1..19: mol_type = other RNA
cctccattgaggcaggggc

SEQ ID NO: 2586 - RNA, 19 nt, synthetic construct
  source 1..19: mol_type = other RNA
gcctccattgaggcagggg

SEQ ID NO: 2587 - RNA, 19 nt, synthetic construct
  source 1..19: mol_type = other RNA
agcctccattgaggcaggg

SEQ ID NO: 2588 - RNA, 19 nt, synthetic construct
  source 1..19: mol_type = other RNA
gagcctccattgaggcagg

SEQ ID NO: 2589 - RNA, 19 nt, synthetic construct
  source 1..19: mol_type = other RNA
ggagcctccattgaggcag

SEQ ID NO: 2590 - RNA, 19 nt, synthetic construct
  source 1..19: mol_type = other RNA
aggagcctccattgaggca

SEQ ID NO: 2591 - RNA, 19 nt, synthetic construct
  source 1..19: mol_type = other RNA
caggagcctccattgaggc

SEQ ID NO: 2592 - RNA, 19 nt, synthetic construct
  source 1..19: mol_type = other RNA
gcaggagcctccattgagg

SEQ ID NO: 2593 - RNA, 19 nt, synthetic construct
  source 1..19: mol_type = other RNA
agcaggagcctccattgag

SEQ ID NO: 2594 - RNA, 19 nt, synthetic construct
  source 1..19: mol_type = other RNA
gagcaggagcctccattga

SEQ ID NO: 2595 - RNA, 19 nt, synthetic construct
  source 1..19: mol_type = other RNA
ggagcaggagcctccattg

SEQ ID NO: 2596 - RNA, 19 nt, synthetic construct
  source 1..19: mol_type = other RNA
tggagcaggagcctccatt

SEQ ID NO: 2597 - RNA, 19 nt, synthetic construct
  source 1..19: mol_type = other RNA
ttggagcaggagcctccat

SEQ ID NO: 2598 - RNA, 19 nt, synthetic construct
  source 1..19: mol_type = other RNA
attggagcaggagcctcca

SEQ ID NO: 2599 - RNA, 19 nt, synthetic construct
  source 1..19: mol_type = other RNA
tattggagcaggagcctcc

SEQ ID NO: 2600 - RNA, 19 nt, synthetic construct
  source 1..19: mol_type = other RNA
gtattggagcaggagcctc

SEQ ID NO: 2601 - RNA, 19 nt, synthetic construct
  source 1..19: mol_type = other RNA
ggtattggagcaggagcct

SEQ ID NO: 2602 - RNA, 19 nt, synthetic construct
  source 1..19: mol_type = other RNA
gggtattggagcaggagcc

SEQ ID NO: 2603 - RNA, 19 nt, synthetic construct
  source 1..19: mol_type = other RNA
tgggtattggagcaggagc

SEQ ID NO: 2604 - RNA, 19 nt, synthetic construct
  source 1..19: mol_type = other RNA
ctgggtattggagcaggag

SEQ ID NO: 2605 - RNA, 19 nt, synthetic construct
  source 1..19: mol_type = other RNA
cctgggtattggagcagga

SEQ ID NO: 2606 - RNA, 19 nt, synthetic construct
  source 1..19: mol_type = other RNA
tcctgggtattggagcagg

SEQ ID NO: 2607 - RNA, 19 nt, synthetic construct
  source 1..19: mol_type = other RNA
gtcctgggtattggagcag

SEQ ID NO: 2608 - RNA, 19 nt, synthetic construct
  source 1..19: mol_type = other RNA
ggtcctgggtattggagca

SEQ ID NO: 2609 - RNA, 19 nt, synthetic construct
  source 1..19: mol_type = other RNA
gggtcctgggtattggagc

SEQ ID NO: 2610 - RNA, 19 nt, synthetic construct
  source 1..19: mol_type = other RNA
ggggtcctgggtattggag

SEQ ID NO: 2611 - RNA, 19 nt, synthetic construct
  source 1..19: mol_type = other RNA
gggggtcctgggtattgga

SEQ ID NO: 2612 - RNA, 19 nt, synthetic construct
  source 1..19: mol_type = other RNA
tgggggtcctgggtattgg

SEQ ID NO: 2613 - RNA, 19 nt, synthetic construct
  source 1..19: mol_type = other RNA
ctgggggtcctgggtattg

SEQ ID NO: 2614 - RNA, 19 nt, synthetic construct
  source 1..19: mol_type = other RNA
actgggggtcctgggtatt

SEQ ID NO: 2615 - RNA, 19 nt, synthetic construct
  source 1..19: mol_type = other RNA
gactgggggtcctgggtat

SEQ ID NO: 2616 - RNA, 19 nt, synthetic construct
  source 1..19: mol_type = other RNA
ggactgggggtcctgggta

SEQ ID NO: 2617 - RNA, 19 nt, synthetic construct
  source 1..19: mol_type = other RNA
aggactgggggtcctgggt

SEQ ID NO: 2618 - RNA, 19 nt, synthetic construct
  source 1..19: mol_type = other RNA
taggactgggggtcctggg

SEQ ID NO: 2619 - RNA, 19 nt, synthetic construct
  source 1..19: mol_type = other RNA
ataggactgggggtcctgg

SEQ ID NO: 2620 - RNA, 19 nt, synthetic construct
  source 1..19: mol_type = other RNA
gataggactgggggtcctg

SEQ ID NO: 2621 - RNA, 19 nt, synthetic construct
  source 1..19: mol_type = other RNA
tgataggactgggggtcct

SEQ ID NO: 2622 - RNA, 19 nt, synthetic construct
  source 1..19: mol_type = other RNA
gtgataggactgggggtcc

SEQ ID NO: 2623 - RNA, 19 nt, synthetic construct
  source 1..19: mol_type = other RNA
agtgataggactgggggtc

SEQ ID NO: 2624 - RNA, 19 nt, synthetic construct
  source 1..19: mol_type = other RNA
cagtgataggactgggggt

SEQ ID NO: 2625 - RNA, 19 nt, synthetic construct
  source 1..19: mol_type = other RNA
gcagtgataggactggggg

SEQ ID NO: 2626 - RNA, 19 nt, synthetic construct
  source 1..19: mol_type = other RNA
tgcagtgataggactgggg

SEQ ID NO: 2627 - RNA, 19 nt, synthetic construct
  source 1..19: mol_type = other RNA
ctgcagtgataggactggg

SEQ ID NO: 2628 - RNA, 19 nt, synthetic construct
  source 1..19: mol_type = other RNA
gctgcagtgataggactgg

SEQ ID NO: 2629 - RNA, 19 nt, synthetic construct
  source 1..19: mol_type = other RNA
agctgcagtgataggactg

SEQ ID NO: 2630 - RNA, 19 nt, synthetic construct
  source 1..19: mol_type = other RNA
cagctgcagtgataggact

SEQ ID NO: 2631 - RNA, 19 nt, synthetic construct
  source 1..19: mol_type = other RNA
gcagctgcagtgataggac

SEQ ID NO: 2632 - RNA, 19 nt, synthetic construct
  source 1..19: mol_type = other RNA
ggcagctgcagtgatagga

SEQ ID NO: 2633 - RNA, 19 nt, synthetic construct
  source 1..19: mol_type = other RNA
gggcagctgcagtgatagg

SEQ ID NO: 2634 - RNA, 19 nt, synthetic construct
  source 1..19: mol_type = other RNA
ggggcagctgcagtgatag

SEQ ID NO: 2635 - RNA, 19 nt, synthetic construct
  source 1..19: mol_type = other RNA
gggggcagctgcagtgata

SEQ ID NO: 2636 - RNA, 19 nt, synthetic construct
  source 1..19: mol_type = other RNA
cgggggcagctgcagtgat

SEQ ID NO: 2637 - RNA, 19 nt, synthetic construct
  source 1..19: mol_type = other RNA
ccgggggcagctgcagtga

SEQ ID NO: 2638 - RNA, 19 nt, synthetic construct
  source 1..19: mol_type = other RNA
cccgggggcagctgcagtg

SEQ ID NO: 2639 - RNA, 19 nt, synthetic construct
  source 1..19: mol_type = other RNA
gcccgggggcagctgcagt

SEQ ID NO: 2640 - RNA, 19 nt, synthetic construct
  source 1..19: mol_type = other RNA
ggcccgggggcagctgcag

SEQ ID NO: 2641 - RNA, 19 nt, synthetic construct
  source 1..19: mol_type = other RNA
aggcccgggggcagctgca

SEQ ID NO: 2642 - RNA, 19 nt, synthetic construct
  source 1..19: mol_type = other RNA
aaggcccgggggcagctgc

SEQ ID NO: 2643 - RNA, 19 nt, synthetic construct
  source 1..19: mol_type = other RNA
gaaggcccgggggcagctg

SEQ ID NO: 2644 - RNA, 19 nt, synthetic construct
  source 1..19: mol_type = other RNA
tgaaggcccgggggcagct

SEQ ID NO: 2645 - RNA, 19 nt, synthetic construct
  source 1..19: mol_type = other RNA
gtgaaggcccgggggcagc

SEQ ID NO: 2646 - RNA, 19 nt, synthetic construct
  source 1..19: mol_type = other RNA
ggtgaaggcccgggggcag

SEQ ID NO: 2647 - RNA, 19 nt, synthetic construct
  source 1..19: mol_type = other RNA
cggtgaaggcccgggggca

SEQ ID NO: 2648 - RNA, 19 nt, synthetic construct
  source 1..19: mol_type = other RNA
ccggtgaaggcccgggggc

SEQ ID NO: 2649 - RNA, 19 nt, synthetic construct
  source 1..19: mol_type = other RNA
gccggtgaaggcccggggg

SEQ ID NO: 2650 - RNA, 19 nt, synthetic construct
  source 1..19: mol_type = other RNA
tgccggtgaaggcccgggg

SEQ ID NO: 2651 - RNA, 19 nt, synthetic construct
  source 1..19: mol_type = other RNA
ttgccggtgaaggcccggg

SEQ ID NO: 2652 - RNA, 19 nt, synthetic construct
  source 1..19: mol_type = other RNA
cttgccggtgaaggcccgg

SEQ ID NO: 2653 - RNA, 19 nt, synthetic construct
  source 1..19: mol_type = other RNA
ccttgccggtgaaggcccg

SEQ ID NO: 2654 - RNA, 19 nt, synthetic construct
  source 1..19: mol_type = other RNA
tccttgccggtgaaggccc

SEQ ID NO: 2655 - RNA, 19 nt, synthetic construct
  source 1..19: mol_type = other RNA
gtccttgccggtgaaggcc

SEQ ID NO: 2656 - RNA, 19 nt, synthetic construct
  source 1..19: mol_type = other RNA
agtccttgccggtgaaggc

SEQ ID NO: 2657 - RNA, 19 nt, synthetic construct
  source 1..19: mol_type = other RNA
cagtccttgccggtgaagg

SEQ ID NO: 2658 - RNA, 19 nt, synthetic construct
  source 1..19: mol_type = other RNA
gcagtccttgccggtgaag

SEQ ID NO: 2659 - RNA, 19 nt, synthetic construct
  source 1..19: mol_type = other RNA
cgcagtccttgccggtgaa

SEQ ID NO: 2660 - RNA, 19 nt, synthetic construct
  source 1..19: mol_type = other RNA
ccgcagtccttgccggtga

SEQ ID NO: 2661 - RNA, 19 nt, synthetic construct
  source 1..19: mol_type = other RNA
gccgcagtccttgccggtg

SEQ ID NO: 2662 - RNA, 19 nt, synthetic construct
  source 1..19: mol_type = other RNA
tgccgcagtccttgccggt

SEQ ID NO: 2663 - RNA, 19 nt, synthetic construct
  source 1..19: mol_type = other RNA
gtgccgcagtccttgccgg

SEQ ID NO: 2664 - RNA, 19 nt, synthetic construct
  source 1..19: mol_type = other RNA
tgtgccgcagtccttgccg

SEQ ID NO: 2665 - RNA, 19 nt, synthetic construct
  source 1..19: mol_type = other RNA
ctgtgccgcagtccttgcc

SEQ ID NO: 2666 - RNA, 19 nt, synthetic construct
  source 1..19: mol_type = other RNA
tctgtgccgcagtccttgc

SEQ ID NO: 2667 - RNA, 19 nt, synthetic construct
  source 1..19: mol_type = other RNA
ctctgtgccgcagtccttg

SEQ ID NO: 2668 - RNA, 19 nt, synthetic construct
  source 1..19: mol_type = other RNA
tctctgtgccgcagtcctt

SEQ ID NO: 2669 - RNA, 19 nt, synthetic construct
  source 1..19: mol_type = other RNA
ttctctgtgccgcagtcct

SEQ ID NO: 2670 - RNA, 19 nt, synthetic construct
  source 1..19: mol_type = other RNA
tttctctgtgccgcagtcc

SEQ ID NO: 2671 - RNA, 19 nt, synthetic construct
  source 1..19: mol_type = other RNA
atttctctgtgccgcagtc

SEQ ID NO: 2672 - RNA, 19 nt, synthetic construct
  source 1..19: mol_type = other RNA
catttctctgtgccgcagt

SEQ ID NO: 2673 - RNA, 19 nt, synthetic construct
  source 1..19: mol_type = other RNA
gcatttctctgtgccgcag

SEQ ID NO: 2674 - RNA, 19 nt, synthetic construct
  source 1..19: mol_type = other RNA
agcatttctctgtgccgca

SEQ ID NO: 2675 - RNA, 19 nt, synthetic construct
  source 1..19: mol_type = other RNA
aagcatttctctgtgccgc

SEQ ID NO: 2676 - RNA, 19 nt, synthetic construct
  source 1..19: mol_type = other RNA
aaagcatttctctgtgccg

SEQ ID NO: 2677 - RNA, 19 nt, synthetic construct
  source 1..19: mol_type = other RNA
caaagcatttctctgtgcc

SEQ ID NO: 2678 - RNA, 19 nt, synthetic construct
  source 1..19: mol_type = other RNA
tcaaagcatttctctgtgc

SEQ ID NO: 2679 - RNA, 19 nt, synthetic construct
  source 1..19: mol_type = other RNA
atcaaagcatttctctgtg

SEQ ID NO: 2680 - RNA, 19 nt, synthetic construct
  source 1..19: mol_type = other RNA
catcaaagcatttctctgt

SEQ ID NO: 2681 - RNA, 19 nt, synthetic construct
  source 1..19: mol_type = other RNA
tcatcaaagcatttctctg

SEQ ID NO: 2682 - RNA, 19 nt, synthetic construct
  source 1..19: mol_type = other RNA
ctcatcaaagcatttctct

SEQ ID NO: 2683 - RNA, 19 nt, synthetic construct
  source 1..19: mol_type = other RNA
tctcatcaaagcatttctc

SEQ ID NO: 2684 - RNA, 19 nt, synthetic construct
  source 1..19: mol_type = other RNA
gtctcatcaaagcatttct

SEQ ID NO: 2685 - RNA, 19 nt, synthetic construct
  source 1..19: mol_type = other RNA
ggtctcatcaaagcatttc

SEQ ID NO: 2686 - RNA, 19 nt, synthetic construct
  source 1..19: mol_type = other RNA
gggtctcatcaaagcattt

SEQ ID NO: 2687 - RNA, 19 nt, synthetic construct
  source 1..19: mol_type = other RNA
cgggtctcatcaaagcatt

SEQ ID NO: 2688 - RNA, 19 nt, synthetic construct
  source 1..19: mol_type = other RNA
gcgggtctcatcaaagcat

SEQ ID NO: 2689 - RNA, 19 nt, synthetic construct
  source 1..19: mol_type = other RNA
agcgggtctcatcaaagca

SEQ ID NO: 2690 - RNA, 19 nt, synthetic construct
  source 1..19: mol_type = other RNA
tagcgggtctcatcaaagc

SEQ ID NO: 2691 - RNA, 19 nt, synthetic construct
  source 1..19: mol_type = other RNA
gtagcgggtctcatcaaag

SEQ ID NO: 2692 - RNA, 19 nt, synthetic construct
  source 1..19: mol_type = other RNA
cgtagcgggtctcatcaaa

SEQ ID NO: 2693 - RNA, 19 nt, synthetic construct
  source 1..19: mol_type = other RNA
tcgtagcgggtctcatcaa

SEQ ID NO: 2694 - RNA, 19 nt, synthetic construct
  source 1..19: mol_type = other RNA
ctcgtagcgggtctcatca

SEQ ID NO: 2695 - RNA, 19 nt, synthetic construct
  source 1..19: mol_type = other RNA
actcgtagcgggtctcatc

SEQ ID NO: 2696 - RNA, 19 nt, synthetic construct
  source 1..19: mol_type = other RNA
tactcgtagcgggtctcat

SEQ ID NO: 2697 - RNA, 19 nt, synthetic construct
  source 1..19: mol_type = other RNA
gtactcgtagcgggtctca

SEQ ID NO: 2698 - RNA, 19 nt, synthetic construct
  source 1..19: mol_type = other RNA
ggtactcgtagcgggtctc

SEQ ID NO: 2699 - RNA, 19 nt, synthetic construct
  source 1..19: mol_type = other RNA
aggtactcgtagcgggtct

SEQ ID NO: 2700 - RNA, 19 nt, synthetic construct
  source 1..19: mol_type = other RNA
caggtactcgtagcgggtc

SEQ ID NO: 2701 - RNA, 19 nt, synthetic construct
  source 1..19: mol_type = other RNA
ccaggtactcgtagcgggt

SEQ ID NO: 2702 - RNA, 19 nt, synthetic construct
  source 1..19: mol_type = other RNA
tccaggtactcgtagcggg

SEQ ID NO: 2703 - RNA, 19 nt, synthetic construct
  source 1..19: mol_type = other RNA
ctccaggtactcgtagcgg

SEQ ID NO: 2704 - RNA, 19 nt, synthetic construct
  source 1..19: mol_type = other RNA
cctccaggtactcgtagcg

SEQ ID NO: 2705 - RNA, 19 nt, synthetic construct
  source 1..19: mol_type = other RNA
ccctccaggtactcgtagc

SEQ ID NO: 2706 - RNA, 19 nt, synthetic construct
  source 1..19: mol_type = other RNA
cccctccaggtactcgtag

SEQ ID NO: 2707 - RNA, 19 nt, synthetic construct
  source 1..19: mol_type = other RNA
ccccctccaggtactcgta

SEQ ID NO: 2708 - RNA, 19 nt, synthetic construct
  source 1..19: mol_type = other RNA
cccccctccaggtactcgt

SEQ ID NO: 2709 - RNA, 19 nt, synthetic construct
  source 1..19: mol_type = other RNA
gcccccctccaggtactcg

SEQ ID NO: 2710 - RNA, 19 nt, synthetic construct
  source 1..19: mol_type = other RNA
cgcccccctccaggtactc

SEQ ID NO: 2711 - RNA, 19 nt, synthetic construct
  source 1..19: mol_type = other RNA
tcgcccccctccaggtact

SEQ ID NO: 2712 - RNA, 19 nt, synthetic construct
  source 1..19: mol_type = other RNA
gtcgcccccctccaggtac

SEQ ID NO: 2713 - RNA, 19 nt, synthetic construct
  source 1..19: mol_type = other RNA
ggtcgcccccctccaggta

SEQ ID NO: 2714 - RNA, 19 nt, synthetic construct
  source 1..19: mol_type = other RNA
cggtcgcccccctccaggt

SEQ ID NO: 2715 - RNA, 19 nt, synthetic construct
  source 1..19: mol_type = other RNA
gcggtcgcccccctccagg

SEQ ID NO: 2716 - RNA, 19 nt, synthetic construct
  source 1..19: mol_type = other RNA
agcggtcgcccccctccag

SEQ ID NO: 2717 - RNA, 19 nt, synthetic construct
  source 1..19: mol_type = other RNA
cagcggtcgcccccctcca

SEQ ID NO: 2718 - RNA, 19 nt, synthetic construct
  source 1..19: mol_type = other RNA
ccagcggtcgcccccctcc

SEQ ID NO: 2719 - RNA, 19 nt, synthetic construct
  source 1..19: mol_type = other RNA
cccagcggtcgcccccctc

SEQ ID NO: 2720 - RNA, 19 nt, synthetic construct
  source 1..19: mol_type = other RNA
gcccagcggtcgcccccct

SEQ ID NO: 2721 - RNA, 19 nt, synthetic construct
  source 1..19: mol_type = other RNA
ggcccagcggtcgcccccc

SEQ ID NO: 2722 - RNA, 19 nt, synthetic construct
  source 1..19: mol_type = other RNA
gggcccagcggtcgccccc

SEQ ID NO: 2723 - RNA, 19 nt, synthetic construct
  source 1..19: mol_type = other RNA
cgggcccagcggtcgcccc

SEQ ID NO: 2724 - RNA, 19 nt, synthetic construct
  source 1..19: mol_type = other RNA
gcgggcccagcggtcgccc

SEQ ID NO: 2725 - RNA, 19 nt, synthetic construct
  source 1..19: mol_type = other RNA
cgcgggcccagcggtcgcc

SEQ ID NO: 2726 - RNA, 19 nt, synthetic construct
  source 1..19: mol_type = other RNA
acgcgggcccagcggtcgc

SEQ ID NO: 2727 - RNA, 19 nt, synthetic construct
  source 1..19: mol_type = other RNA
cacgcgggcccagcggtcg

SEQ ID NO: 2728 - RNA, 19 nt, synthetic construct
  source 1..19: mol_type = other RNA
gcacgcgggcccagcggtc

SEQ ID NO: 2729 - RNA, 19 nt, synthetic construct
  source 1..19: mol_type = other RNA
cgcacgcgggcccagcggt

SEQ ID NO: 2730 - RNA, 19 nt, synthetic construct
  source 1..19: mol_type = other RNA
gcgcacgcgggcccagcgg

SEQ ID NO: 2731 - RNA, 19 nt, synthetic construct
  source 1..19: mol_type = other RNA
ggcgcacgcgggcccagcg

SEQ ID NO: 2732 - RNA, 19 nt, synthetic construct
  source 1..19: mol_type = other RNA
tggcgcacgcgggcccagc

SEQ ID NO: 2733 - RNA, 19 nt, synthetic construct
  source 1..19: mol_type = other RNA
ctggcgcacgcgggcccag

SEQ ID NO: 2734 - RNA, 19 nt, synthetic construct
  source 1..19: mol_type = other RNA
cctggcgcacgcgggccca

SEQ ID NO: 2735 - RNA, 19 nt, synthetic construct
  source 1..19: mol_type = other RNA
ccctggcgcacgcgggccc

SEQ ID NO: 2736 - RNA, 19 nt, synthetic construct
  source 1..19: mol_type = other RNA
gccctggcgcacgcgggcc

SEQ ID NO: 2737 - RNA, 19 nt, synthetic construct
  source 1..19: mol_type = other RNA
ggccctggcgcacgcgggc

SEQ ID NO: 2738 - RNA, 19 nt, synthetic construct
  source 1..19: mol_type = other RNA
tggccctggcgcacgcggg

SEQ ID NO: 2739 - RNA, 19 nt, synthetic construct
  source 1..19: mol_type = other RNA
gtggccctggcgcacgcgg

SEQ ID NO: 2740 - RNA, 19 nt, synthetic construct
  source 1..19: mol_type = other RNA
cgtggccctggcgcacgcg

SEQ ID NO: 2741 - RNA, 19 nt, synthetic construct
  source 1..19: mol_type = other RNA
acgtggccctggcgcacgc

SEQ ID NO: 2742 - RNA, 19 nt, synthetic construct
  source 1..19: mol_type = other RNA
cacgtggccctggcgcacg

SEQ ID NO: 2743 - RNA, 19 nt, synthetic construct
  source 1..19: mol_type = other RNA
ccacgtggccctggcgcac

SEQ ID NO: 2744 - RNA, 19 nt, synthetic construct
  source 1..19: mol_type = other RNA
tccacgtggccctggcgca

SEQ ID NO: 2745 - RNA, 19 nt, synthetic construct
  source 1..19: mol_type = other RNA
ttccacgtggccctggcgc

SEQ ID NO: 2746 - RNA, 19 nt, synthetic construct
  source 1..19: mol_type = other RNA
gttccacgtggccctggcg

SEQ ID NO: 2747 - RNA, 19 nt, synthetic construct
  source 1..19: mol_type = other RNA
tgttccacgtggccctggc

SEQ ID NO: 2748 - RNA, 19 nt, synthetic construct
  source 1..19: mol_type = other RNA
ctgttccacgtggccctgg

SEQ ID NO: 2749 - RNA, 19 nt, synthetic construct
  source 1..19: mol_type = other RNA
actgttccacgtggccctg

SEQ ID NO: 2750 - RNA, 19 nt, synthetic construct
  source 1..19: mol_type = other RNA
cactgttccacgtggccct

SEQ ID NO: 2751 - RNA, 19 nt, synthetic construct
  source 1..19: mol_type = other RNA
gcactgttccacgtggccc

SEQ ID NO: 2752 - RNA, 19 nt, synthetic construct
  source 1..19: mol_type = other RNA
cgcactgttccacgtggcc

SEQ ID NO: 2753 - RNA, 19 nt, synthetic construct
  source 1..19: mol_type = other RNA
tcgcactgttccacgtggc

SEQ ID NO: 2754 - RNA, 19 nt, synthetic construct
  source 1..19: mol_type = other RNA
ctcgcactgttccacgtgg

SEQ ID NO: 2755 - RNA, 19 nt, synthetic construct
  source 1..19: mol_type = other RNA
actcgcactgttccacgtg

SEQ ID NO: 2756 - RNA, 19 nt, synthetic construct
  source 1..19: mol_type = other RNA
cactcgcactgttccacgt

SEQ ID NO: 2757 - RNA, 19 nt, synthetic construct
  source 1..19: mol_type = other RNA
gcactcgcactgttccacg

SEQ ID NO: 2758 - RNA, 19 nt, synthetic construct
  source 1..19: mol_type = other RNA
agcactcgcactgttccac

SEQ ID NO: 2759 - RNA, 19 nt, synthetic construct
  source 1..19: mol_type = other RNA
aagcactcgcactgttcca

SEQ ID NO: 2760 - RNA, 19 nt, synthetic construct
  source 1..19: mol_type = other RNA
gaagcactcgcactgttcc

SEQ ID NO: 2761 - RNA, 19 nt, synthetic construct
  source 1..19: mol_type = other RNA
cgaagcactcgcactgttc

SEQ ID NO: 2762 - RNA, 19 nt, synthetic construct
  source 1..19: mol_type = other RNA
ccgaagcactcgcactgtt

SEQ ID NO: 2763 - RNA, 19 nt, synthetic construct
  source 1..19: mol_type = other RNA
cccgaagcactcgcactgt

SEQ ID NO: 2764 - RNA, 19 nt, synthetic construct
  source 1..19: mol_type = other RNA
ccccgaagcactcgcactg

SEQ ID NO: 2765 - RNA, 19 nt, synthetic construct
  source 1..19: mol_type = other RNA
cccccgaagcactcgcact

SEQ ID NO: 2766 - RNA, 19 nt, synthetic construct
  source 1..19: mol_type = other RNA
gcccccgaagcactcgcac

SEQ ID NO: 2767 - RNA, 19 nt, synthetic construct
  source 1..19: mol_type = other RNA
ggcccccgaagcactcgca

SEQ ID NO: 2768 - RNA, 19 nt, synthetic construct
  source 1..19: mol_type = other RNA
cggcccccgaagcactcgc

SEQ ID NO: 2769 - RNA, 19 nt, synthetic construct
  source 1..19: mol_type = other RNA
ccggcccccgaagcactcg

SEQ ID NO: 2770 - RNA, 19 nt, synthetic construct
  source 1..19: mol_type = other RNA
tccggcccccgaagcactc

SEQ ID NO: 2771 - RNA, 19 nt, synthetic construct
  source 1..19: mol_type = other RNA
gtccggcccccgaagcact

SEQ ID NO: 2772 - RNA, 19 nt, synthetic construct
  source 1..19: mol_type = other RNA
ggtccggcccccgaagcac

SEQ ID NO: 2773 - RNA, 19 nt, synthetic construct
  source 1..19: mol_type = other RNA
aggtccggcccccgaagca

SEQ ID NO: 2774 - RNA, 19 nt, synthetic construct
  source 1..19: mol_type = other RNA
caggtccggcccccgaagc

SEQ ID NO: 2775 - RNA, 19 nt, synthetic construct
  source 1..19: mol_type = other RNA
ccaggtccggcccccgaag

SEQ ID NO: 2776 - RNA, 19 nt, synthetic construct
  source 1..19: mol_type = other RNA
accaggtccggcccccgaa

SEQ ID NO: 2777 - RNA, 19 nt, synthetic construct
  source 1..19: mol_type = other RNA
caccaggtccggcccccga

SEQ ID NO: 2778 - RNA, 19 nt, synthetic construct
  source 1..19: mol_type = other RNA
gcaccaggtccggcccccg

SEQ ID NO: 2779 - RNA, 19 nt, synthetic construct
  source 1..19: mol_type = other RNA
cgcaccaggtccggccccc

SEQ ID NO: 2780 - RNA, 19 nt, synthetic construct
  source 1..19: mol_type = other RNA
tcgcaccaggtccggcccc

SEQ ID NO: 2781 - RNA, 19 nt, synthetic construct
  source 1..19: mol_type = other RNA
ttcgcaccaggtccggccc

SEQ ID NO: 2782 - RNA, 19 nt, synthetic construct
  source 1..19: mol_type = other RNA
cttcgcaccaggtccggcc

SEQ ID NO: 2783 - RNA, 19 nt, synthetic construct
  source 1..19: mol_type = other RNA
ccttcgcaccaggtccggc

SEQ ID NO: 2784 - RNA, 19 nt, synthetic construct
  source 1..19: mol_type = other RNA
gccttcgcaccaggtccgg

SEQ ID NO: 2785 - RNA, 19 nt, synthetic construct
  source 1..19: mol_type = other RNA
tgccttcgcaccaggtccg

SEQ ID NO: 2786 - RNA, 19 nt, synthetic construct
  source 1..19: mol_type = other RNA
gtgccttcgcaccaggtcc

SEQ ID NO: 2787 - RNA, 19 nt, synthetic construct
  source 1..19: mol_type = other RNA
ggtgccttcgcaccaggtc

SEQ ID NO: 2788 - RNA, 19 nt, synthetic construct
  source 1..19: mol_type = other RNA
gggtgccttcgcaccaggt

SEQ ID NO: 2789 - RNA, 19 nt, synthetic construct
  source 1..19: mol_type = other RNA
cgggtgccttcgcaccagg

SEQ ID NO: 2790 - RNA, 19 nt, synthetic construct
  source 1..19: mol_type = other RNA
tcgggtgccttcgcaccag

SEQ ID NO: 2791 - RNA, 19 nt, synthetic construct
  source 1..19: mol_type = other RNA
gtcgggtgccttcgcacca

SEQ ID NO: 2792 - RNA, 19 nt, synthetic construct
  source 1..19: mol_type = other RNA
tgtcgggtgccttcgcacc

SEQ ID NO: 2793 - RNA, 19 nt, synthetic construct
  source 1..19: mol_type = other RNA
atgtcgggtgccttcgcac

SEQ ID NO: 2794 - RNA, 19 nt, synthetic construct
  source 1..19: mol_type = other RNA
tatgtcgggtgccttcgca

SEQ ID NO: 2795 - RNA, 19 nt, synthetic construct
  source 1..19: mol_type = other RNA
gtatgtcgggtgccttcgc

SEQ ID NO: 2796 - RNA, 19 nt, synthetic construct
  source 1..19: mol_type = other RNA
tgtatgtcgggtgccttcg

SEQ ID NO: 2797 - RNA, 19 nt, synthetic construct
  source 1..19: mol_type = other RNA
ctgtatgtcgggtgccttc

SEQ ID NO: 2798 - RNA, 19 nt, synthetic construct
  source 1..19: mol_type = other RNA
gctgtatgtcgggtgcctt

SEQ ID NO: 2799 - RNA, 19 nt, synthetic construct
  source 1..19: mol_type = other RNA
agctgtatgtcgggtgcct

SEQ ID NO: 2800 - RNA, 19 nt, synthetic construct
  source 1..19: mol_type = other RNA
aagctgtatgtcgggtgcc

SEQ ID NO: 2801 - RNA, 19 nt, synthetic construct
  source 1..19: mol_type = other RNA
caagctgtatgtcgggtgc

SEQ ID NO: 2802 - RNA, 19 nt, synthetic construct
  source 1..19: mol_type = other RNA
acaagctgtatgtcgggtg

SEQ ID NO: 2803 - RNA, 19 nt, synthetic construct
  source 1..19: mol_type = other RNA
gacaagctgtatgtcgggt

SEQ ID NO: 2804 - RNA, 19 nt, synthetic construct
  source 1..19: mol_type = other RNA
agacaagctgtatgtcggg

SEQ ID NO: 2805 - RNA, 19 nt, synthetic construct
  source 1..19: mol_type = other RNA
cagacaagctgtatgtcgg

SEQ ID NO: 2806 - RNA, 19 nt, synthetic construct
  source 1..19: mol_type = other RNA
tcagacaagctgtatgtcg

SEQ ID NO: 2807 - RNA, 19 nt, synthetic construct
  source 1..19: mol_type = other RNA
ctcagacaagctgtatgtc

SEQ ID NO: 2808 - RNA, 19 nt, synthetic construct
  source 1..19: mol_type = other RNA
gctcagacaagctgtatgt

SEQ ID NO: 2809 - RNA, 19 nt, synthetic construct
  source 1..19: mol_type = other RNA
tgctcagacaagctgtatg

SEQ ID NO: 2810 - RNA, 19 nt, synthetic construct
  source 1..19: mol_type = other RNA
ctgctcagacaagctgtat

SEQ ID NO: 2811 - RNA, 19 nt, synthetic construct
  source 1..19: mol_type = other RNA
gctgctcagacaagctgta

SEQ ID NO: 2812 - RNA, 19 nt, synthetic construct
  source 1..19: mol_type = other RNA
ggctgctcagacaagctgt

SEQ ID NO: 2813 - RNA, 19 nt, synthetic construct
  source 1..19: mol_type = other RNA
gggctgctcagacaagctg

SEQ ID NO: 2814 - RNA, 19 nt, synthetic construct
  source 1..19: mol_type = other RNA
agggctgctcagacaagct

SEQ ID NO: 2815 - RNA, 19 nt, synthetic construct
  source 1..19: mol_type = other RNA
aagggctgctcagacaagc

SEQ ID NO: 2816 - RNA, 19 nt, synthetic construct
  source 1..19: mol_type = other RNA
caagggctgctcagacaag

SEQ ID NO: 2817 - RNA, 19 nt, synthetic construct
  source 1..19: mol_type = other RNA
gcaagggctgctcagacaa

SEQ ID NO: 2818 - RNA, 19 nt, synthetic construct
  source 1..19: mol_type = other RNA
ggcaagggctgctcagaca

SEQ ID NO: 2819 - RNA, 19 nt, synthetic construct
  source 1..19: mol_type = other RNA
aggcaagggctgctcagac

SEQ ID NO: 2820 - RNA, 19 nt, synthetic construct
  source 1..19: mol_type = other RNA
caggcaagggctgctcaga

SEQ ID NO: 2821 - RNA, 19 nt, synthetic construct
  source 1..19: mol_type = other RNA
tcaggcaagggctgctcag

SEQ ID NO: 2822 - RNA, 19 nt, synthetic construct
  source 1..19: mol_type = other RNA
ttcaggcaagggctgctca

SEQ ID NO: 2823 - RNA, 19 nt, synthetic construct
  source 1..19: mol_type = other RNA
gttcaggcaagggctgctc

SEQ ID NO: 2824 - RNA, 19 nt, synthetic construct
  source 1..19: mol_type = other RNA
cgttcaggcaagggctgct

SEQ ID NO: 2825 - RNA, 19 nt, synthetic construct
  source 1..19: mol_type = other RNA
ccgttcaggcaagggctgc

SEQ ID NO: 2826 - RNA, 19 nt, synthetic construct
  source 1..19: mol_type = other RNA
cccgttcaggcaagggctg

SEQ ID NO: 2827 - RNA, 19 nt, synthetic construct
  source 1..19: mol_type = other RNA
ccccgttcaggcaagggct

SEQ ID NO: 2828 - RNA, 19 nt, synthetic construct
  source 1..19: mol_type = other RNA
cccccgttcaggcaagggc

SEQ ID NO: 2829 - RNA, 19 nt, synthetic construct
  source 1..19: mol_type = other RNA
gcccccgttcaggcaaggg

SEQ ID NO: 2830 - RNA, 19 nt, synthetic construct
  source 1..19: mol_type = other RNA
tgcccccgttcaggcaagg

SEQ ID NO: 2831 - RNA, 19 nt, synthetic construct
  source 1..19: mol_type = other RNA
gtgcccccgttcaggcaag

SEQ ID NO: 2832 - RNA, 19 nt, synthetic construct
  source 1..19: mol_type = other RNA
ggtgcccccgttcaggcaa

SEQ ID NO: 2833 - RNA, 19 nt, synthetic construct
  source 1..19: mol_type = other RNA
aggtgcccccgttcaggca

SEQ ID NO: 2834 - RNA, 19 nt, synthetic construct
  source 1..19: mol_type = other RNA
caggtgcccccgttcaggc

SEQ ID NO: 2835 - RNA, 19 nt, synthetic construct
  source 1..19: mol_type = other RNA
gcaggtgcccccgttcagg

SEQ ID NO: 2836 - RNA, 19 nt, synthetic construct
  source 1..19: mol_type = other RNA
ggcaggtgcccccgttcag

SEQ ID NO: 2837 - RNA, 19 nt, synthetic construct
  source 1..19: mol_type = other RNA
tggcaggtgcccccgttca

SEQ ID NO: 2838 - RNA, 19 nt, synthetic construct
  source 1..19: mol_type = other RNA
gtggcaggtgcccccgttc

SEQ ID NO: 2839 - RNA, 19 nt, synthetic construct
  source 1..19: mol_type = other RNA
ggtggcaggtgcccccgtt

SEQ ID NO: 2840 - RNA, 19 nt, synthetic construct
  source 1..19: mol_type = other RNA
aggtggcaggtgcccccgt

SEQ ID NO: 2841 - RNA, 19 nt, synthetic construct
  source 1..19: mol_type = other RNA
caggtggcaggtgcccccg

SEQ ID NO: 2842 - RNA, 19 nt, synthetic construct
  source 1..19: mol_type = other RNA
tcaggtggcaggtgccccc

SEQ ID NO: 2843 - RNA, 19 nt, synthetic construct
  source 1..19: mol_type = other RNA
atcaggtggcaggtgcccc

SEQ ID NO: 2844 - RNA, 19 nt, synthetic construct
  source 1..19: mol_type = other RNA
gatcaggtggcaggtgccc

SEQ ID NO: 2845 - RNA, 19 nt, synthetic construct
  source 1..19: mol_type = other RNA
cgatcaggtggcaggtgcc

SEQ ID NO: 2846 - RNA, 19 nt, synthetic construct
  source 1..19: mol_type = other RNA
acgatcaggtggcaggtgc

SEQ ID NO: 2847 - RNA, 19 nt, synthetic construct
  source 1..19: mol_type = other RNA
cacgatcaggtggcaggtg

SEQ ID NO: 2848 - RNA, 19 nt, synthetic construct
  source 1..19: mol_type = other RNA
ccacgatcaggtggcaggt

SEQ ID NO: 2849 - RNA, 19 nt, synthetic construct
  source 1..19: mol_type = other RNA
gccacgatcaggtggcagg

SEQ ID NO: 2850 - RNA, 19 nt, synthetic construct
  source 1..19: mol_type = other RNA
ggccacgatcaggtggcag

SEQ ID NO: 2851 - RNA, 19 nt, synthetic construct
  source 1..19: mol_type = other RNA
tggccacgatcaggtggca

SEQ ID NO: 2852 - RNA, 19 nt, synthetic construct
  source 1..19: mol_type = other RNA
gtggccacgatcaggtggc

SEQ ID NO: 2853 - RNA, 19 nt, synthetic construct
  source 1..19: mol_type = other RNA
ggtggccacgatcaggtgg

SEQ ID NO: 2854 - RNA, 19 nt, synthetic construct
  source 1..19: mol_type = other RNA
cggtggccacgatcaggtg

SEQ ID NO: 2855 - RNA, 19 nt, synthetic construct
  source 1..19: mol_type = other RNA
ccggtggccacgatcaggt

SEQ ID NO: 2856 - RNA, 19 nt, synthetic construct
  source 1..19: mol_type = other RNA
cccggtggccacgatcagg

SEQ ID NO: 2857 - RNA, 19 nt, synthetic construct
  source 1..19: mol_type = other RNA
tcccggtggccacgatcag

SEQ ID NO: 2858 - RNA, 19 nt, synthetic construct
  source 1..19: mol_type = other RNA
gtcccggtggccacgatca

SEQ ID NO: 2859 - RNA, 19 nt, synthetic construct
  source 1..19: mol_type = other RNA
ggtcccggtggccacgatc

SEQ ID NO: 2860 - RNA, 19 nt, synthetic construct
  source 1..19: mol_type = other RNA
tggtcccggtggccacgat

SEQ ID NO: 2861 - RNA, 19 nt, synthetic construct
  source 1..19: mol_type = other RNA
gtggtcccggtggccacga

SEQ ID NO: 2862 - RNA, 19 nt, synthetic construct
  source 1..19: mol_type = other RNA
ggtggtcccggtggccacg

SEQ ID NO: 2863 - RNA, 19 nt, synthetic construct
  source 1..19: mol_type = other RNA
cggtggtcccggtggccac

SEQ ID NO: 2864 - RNA, 19 nt, synthetic construct
  source 1..19: mol_type = other RNA
acggtggtcccggtggcca

SEQ ID NO: 2865 - RNA, 19 nt, synthetic construct
  source 1..19: mol_type = other RNA
cacggtggtcccggtggcc

SEQ ID NO: 2866 - RNA, 19 nt, synthetic construct
  source 1..19: mol_type = other RNA
acacggtggtcccggtggc

SEQ ID NO: 2867 - RNA, 19 nt, synthetic construct
  source 1..19: mol_type = other RNA
cacacggtggtcccggtgg

SEQ ID NO: 2868 - RNA, 19 nt, synthetic construct
  source 1..19: mol_type = other RNA
acacacggtggtcccggtg

SEQ ID NO: 2869 - RNA, 19 nt, synthetic construct
  source 1..19: mol_type = other RNA
cacacacggtggtcccggt

SEQ ID NO: 2870 - RNA, 19 nt, synthetic construct
  source 1..19: mol_type = other RNA
gcacacacggtggtcccgg

SEQ ID NO: 2871 - RNA, 19 nt, synthetic construct
  source 1..19: mol_type = other RNA
ggcacacacggtggtcccg

SEQ ID NO: 2872 - RNA, 19 nt, synthetic construct
  source 1..19: mol_type = other RNA
aggcacacacggtggtccc

SEQ ID NO: 2873 - RNA, 19 nt, synthetic construct
  source 1..19: mol_type = other RNA
caggcacacacggtggtcc

SEQ ID NO: 2874 - RNA, 19 nt, synthetic construct
  source 1..19: mol_type = other RNA
gcaggcacacacggtggtc

SEQ ID NO: 2875 - RNA, 19 nt, synthetic construct
  source 1..19: mol_type = other RNA
ggcaggcacacacggtggt

SEQ ID NO: 2876 - RNA, 19 nt, synthetic construct
  source 1..19: mol_type = other RNA
gggcaggcacacacggtgg

SEQ ID NO: 2877 - RNA, 19 nt, synthetic construct
  source 1..19: mol_type = other RNA
tgggcaggcacacacggtg

SEQ ID NO: 2878 - RNA, 19 nt, synthetic construct
  source 1..19: mol_type = other RNA
gtgggcaggcacacacggt

SEQ ID NO: 2879 - RNA, 19 nt, synthetic construct
  source 1..19: mol_type = other RNA
ggtgggcaggcacacacgg

SEQ ID NO: 2880 - RNA, 19 nt, synthetic construct
  source 1..19: mol_type = other RNA
tggtgggcaggcacacacg

SEQ ID NO: 2881 - RNA, 19 nt, synthetic construct
  source 1..19: mol_type = other RNA
ctggtgggcaggcacacac

SEQ ID NO: 2882 - RNA, 19 nt, synthetic construct
  source 1..19: mol_type = other RNA
cctggtgggcaggcacaca

SEQ ID NO: 2883 - RNA, 19 nt, synthetic construct
  source 1..19: mol_type = other RNA
gcctggtgggcaggcacac

SEQ ID NO: 2884 - RNA, 19 nt, synthetic construct
  source 1..19: mol_type = other RNA
agcctggtgggcaggcaca

SEQ ID NO: 2885 - RNA, 19 nt, synthetic construct
  source 1..19: mol_type = other RNA
aagcctggtgggcaggcac

SEQ ID NO: 2886 - RNA, 19 nt, synthetic construct
  source 1..19: mol_type = other RNA
gaagcctggtgggcaggca

SEQ ID NO: 2887 - RNA, 19 nt, synthetic construct
  source 1..19: mol_type = other RNA
cgaagcctggtgggcaggc

SEQ ID NO: 2888 - RNA, 19 nt, synthetic construct
  source 1..19: mol_type = other RNA
gcgaagcctggtgggcagg

SEQ ID NO: 2889 - RNA, 19 nt, synthetic construct
  source 1..19: mol_type = other RNA
agcgaagcctggtgggcag

SEQ ID NO: 2890 - RNA, 19 nt, synthetic construct
  source 1..19: mol_type = other RNA
cagcgaagcctggtgggca

SEQ ID NO: 2891 - RNA, 19 nt, synthetic construct
  source 1..19: mol_type = other RNA
ccagcgaagcctggtgggc

SEQ ID NO: 2892 - RNA, 19 nt, synthetic construct
  source 1..19: mol_type = other RNA
tccagcgaagcctggtggg

SEQ ID NO: 2893 - RNA, 19 nt, synthetic construct
  source 1..19: mol_type = other RNA
gtccagcgaagcctggtgg

SEQ ID NO: 2894 - RNA, 19 nt, synthetic construct
  source 1..19: mol_type = other RNA
cgtccagcgaagcctggtg

SEQ ID NO: 2895 - RNA, 19 nt, synthetic construct
  source 1..19: mol_type = other RNA
ccgtccagcgaagcctggt

SEQ ID NO: 2896 - RNA, 19 nt, synthetic construct
  source 1..19: mol_type = other RNA
gccgtccagcgaagcctgg

SEQ ID NO: 2897 - RNA, 19 nt, synthetic construct
  source 1..19: mol_type = other RNA
agccgtccagcgaagcctg

SEQ ID NO: 2898 - RNA, 19 nt, synthetic construct
  source 1..19: mol_type = other RNA
gagccgtccagcgaagcct

SEQ ID NO: 2899 - RNA, 19 nt, synthetic construct
  source 1..19: mol_type = other RNA
agagccgtccagcgaagcc

SEQ ID NO: 2900 - RNA, 19 nt, synthetic construct
  source 1..19: mol_type = other RNA
cagagccgtccagcgaagc

SEQ ID NO: 2901 - RNA, 19 nt, synthetic construct
  source 1..19: mol_type = other RNA
gcagagccgtccagcgaag

SEQ ID NO: 2902 - RNA, 19 nt, synthetic construct
  source 1..19: mol_type = other RNA
tgcagagccgtccagcgaa

SEQ ID NO: 2903 - RNA, 19 nt, synthetic construct
  source 1..19: mol_type = other RNA
ttgcagagccgtccagcga

SEQ ID NO: 2904 - RNA, 19 nt, synthetic construct
  source 1..19: mol_type = other RNA
gttgcagagccgtccagcg

SEQ ID NO: 2905 - RNA, 19 nt, synthetic construct
  source 1..19: mol_type = other RNA
tgttgcagagccgtccagc

SEQ ID NO: 2906 - RNA, 19 nt, synthetic construct
  source 1..19: mol_type = other RNA
atgttgcagagccgtccag

SEQ ID NO: 2907 - RNA, 19 nt, synthetic construct
  source 1..19: mol_type = other RNA
gatgttgcagagccgtcca

SEQ ID NO: 2908 - RNA, 19 nt, synthetic construct
  source 1..19: mol_type = other RNA
cgatgttgcagagccgtcc

SEQ ID NO: 2909 - RNA, 19 nt, synthetic construct
  source 1..19: mol_type = other RNA
tcgatgttgcagagccgtc

SEQ ID NO: 2910 - RNA, 19 nt, synthetic construct
  source 1..19: mol_type = other RNA
ctcgatgttgcagagccgt

SEQ ID NO: 2911 - RNA, 19 nt, synthetic construct
  source 1..19: mol_type = other RNA
gctcgatgttgcagagccg

SEQ ID NO: 2912 - RNA, 19 nt, synthetic construct
  source 1..19: mol_type = other RNA
ggctcgatgttgcagagcc

SEQ ID NO: 2913 - RNA, 19 nt, synthetic construct
  source 1..19: mol_type = other RNA
aggctcgatgttgcagagc

SEQ ID NO: 2914 - RNA, 19 nt, synthetic construct
  source 1..19: mol_type = other RNA
caggctcgatgttgcagag

SEQ ID NO: 2915 - RNA, 19 nt, synthetic construct
  source 1..19: mol_type = other RNA
tcaggctcgatgttgcaga

SEQ ID NO: 2916 - RNA, 19 nt, synthetic construct
  source 1..19: mol_type = other RNA
atcaggctcgatgttgcag

SEQ ID NO: 2917 - RNA, 19 nt, synthetic construct
  source 1..19: mol_type = other RNA
catcaggctcgatgttgca

SEQ ID NO: 2918 - RNA, 19 nt, synthetic construct
  source 1..19: mol_type = other RNA
tcatcaggctcgatgttgc

SEQ ID NO: 2919 - RNA, 19 nt, synthetic construct
  source 1..19: mol_type = other RNA
ctcatcaggctcgatgttg

SEQ ID NO: 2920 - RNA, 19 nt, synthetic construct
  source 1..19: mol_type = other RNA
gctcatcaggctcgatgtt

SEQ ID NO: 2921 - RNA, 19 nt, synthetic construct
  source 1..19: mol_type = other RNA
cgctcatcaggctcgatgt

SEQ ID NO: 2922 - RNA, 19 nt, synthetic construct
  source 1..19: mol_type = other RNA
gcgctcatcaggctcgatg

SEQ ID NO: 2923 - RNA, 19 nt, synthetic construct
  source 1..19: mol_type = other RNA
agcgctcatcaggctcgat

SEQ ID NO: 2924 - RNA, 19 nt, synthetic construct
  source 1..19: mol_type = other RNA
cagcgctcatcaggctcga

SEQ ID NO: 2925 - RNA, 19 nt, synthetic construct
  source 1..19: mol_type = other RNA
gcagcgctcatcaggctcg

SEQ ID NO: 2926 - RNA, 19 nt, synthetic construct
  source 1..19: mol_type = other RNA
agcagcgctcatcaggctc

SEQ ID NO: 2927 - RNA, 19 nt, synthetic construct
  source 1..19: mol_type = other RNA
aagcagcgctcatcaggct

SEQ ID NO: 2928 - RNA, 19 nt, synthetic construct
  source 1..19: mol_type = other RNA
gaagcagcgctcatcaggc

SEQ ID NO: 2929 - RNA, 19 nt, synthetic construct
  source 1..19: mol_type = other RNA
agaagcagcgctcatcagg

SEQ ID NO: 2930 - RNA, 19 nt, synthetic construct
  source 1..19: mol_type = other RNA
aagaagcagcgctcatcag

SEQ ID NO: 2931 - RNA, 19 nt, synthetic construct
  source 1..19: mol_type = other RNA
caagaagcagcgctcatca

SEQ ID NO: 2932 - RNA, 19 nt, synthetic construct
  source 1..19: mol_type = other RNA
ccaagaagcagcgctcatc

SEQ ID NO: 2933 - RNA, 19 nt, synthetic construct
  source 1..19: mol_type = other RNA
cccaagaagcagcgctcat

SEQ ID NO: 2934 - RNA, 19 nt, synthetic construct
  source 1..19: mol_type = other RNA
ccccaagaagcagcgctca

SEQ ID NO: 2935 - RNA, 19 nt, synthetic construct
  source 1..19: mol_type = other RNA
tccccaagaagcagcgctc

SEQ ID NO: 2936 - RNA, 19 nt, synthetic construct
  source 1..19: mol_type = other RNA
ttccccaagaagcagcgct

SEQ ID NO: 2937 - RNA, 19 nt, synthetic construct
  source 1..19: mol_type = other RNA
gttccccaagaagcagcgc

SEQ ID NO: 2938 - RNA, 19 nt, synthetic construct
  source 1..19: mol_type = other RNA
cgttccccaagaagcagcg

SEQ ID NO: 2939 - RNA, 19 nt, synthetic construct
  source 1..19: mol_type = other RNA
ccgttccccaagaagcagc

SEQ ID NO: 2940 - RNA, 19 nt, synthetic construct
  source 1..19: mol_type = other RNA
gccgttccccaagaagcag

SEQ ID NO: 2941 - RNA, 19 nt, synthetic construct
  source 1..19: mol_type = other RNA
tgccgttccccaagaagca

SEQ ID NO: 2942 - RNA, 19 nt, synthetic construct
  source 1..19: mol_type = other RNA
gtgccgttccccaagaagc

SEQ ID NO: 2943 - RNA, 19 nt, synthetic construct
  source 1..19: mol_type = other RNA
agtgccgttccccaagaag

SEQ ID NO: 2944 - RNA, 19 nt, synthetic construct
  source 1..19: mol_type = other RNA
cagtgccgttccccaagaa

SEQ ID NO: 2945 - RNA, 19 nt, synthetic construct
  source 1..19: mol_type = other RNA
ccagtgccgttccccaaga

SEQ ID NO: 2946 - RNA, 19 nt, synthetic construct
  source 1..19: mol_type = other RNA
cccagtgccgttccccaag

SEQ ID NO: 2947 - RNA, 19 nt, synthetic construct
  source 1..19: mol_type = other RNA
acccagtgccgttccccaa

SEQ ID NO: 2948 - RNA, 19 nt, synthetic construct
  source 1..19: mol_type = other RNA
tacccagtgccgttcccca

SEQ ID NO: 2949 - RNA, 19 nt, synthetic construct
  source 1..19: mol_type = other RNA
gtacccagtgccgttcccc

SEQ ID NO: 2950 - RNA, 19 nt, synthetic construct
  source 1..19: mol_type = other RNA
ggtacccagtgccgttccc

SEQ ID NO: 2951 - RNA, 19 nt, synthetic construct
  source 1..19: mol_type = other RNA
cggtacccagtgccgttcc

SEQ ID NO: 2952 - RNA, 19 nt, synthetic construct
  source 1..19: mol_type = other RNA
acggtacccagtgccgttc

SEQ ID NO: 2953 - RNA, 19 nt, synthetic construct
  source 1..19: mol_type = other RNA
cacggtacccagtgccgtt

SEQ ID NO: 2954 - RNA, 19 nt, synthetic construct
  source 1..19: mol_type = other RNA
ccacggtacccagtgccgt

SEQ ID NO: 2955 - RNA, 19 nt, synthetic construct
  source 1..19: mol_type = other RNA
gccacggtacccagtgccg

SEQ ID NO: 2956 - RNA, 19 nt, synthetic construct
  source 1..19: mol_type = other RNA
cgccacggtacccagtgcc

SEQ ID NO: 2957 - RNA, 19 nt, synthetic construct
  source 1..19: mol_type = other RNA
acgccacggtacccagtgc

SEQ ID NO: 2958 - RNA, 19 nt, synthetic construct
  source 1..19: mol_type = other RNA
cacgccacggtacccagtg

SEQ ID NO: 2959 - RNA, 19 nt, synthetic construct
  source 1..19: mol_type = other RNA
ccacgccacggtacccagt

SEQ ID NO: 2960 - RNA, 19 nt, synthetic construct
  source 1..19: mol_type = other RNA
gccacgccacggtacccag

SEQ ID NO: 2961 - RNA, 19 nt, synthetic construct
  source 1..19: mol_type = other RNA
ggccacgccacggtaccca

SEQ ID NO: 2962 - RNA, 19 nt, synthetic construct
  source 1..19: mol_type = other RNA
tggccacgccacggtaccc

SEQ ID NO: 2963 - RNA, 19 nt, synthetic construct
  source 1..19: mol_type = other RNA
ctggccacgccacggtacc

SEQ ID NO: 2964 - RNA, 19 nt, synthetic construct
  source 1..19: mol_type = other RNA
gctggccacgccacggtac

SEQ ID NO: 2965 - RNA, 19 nt, synthetic construct
  source 1..19: mol_type = other RNA
tgctggccacgccacggta

SEQ ID NO: 2966 - RNA, 19 nt, synthetic construct
  source 1..19: mol_type = other RNA
gtgctggccacgccacggt

SEQ ID NO: 2967 - RNA, 19 nt, synthetic construct
  source 1..19: mol_type = other RNA
ggtgctggccacgccacgg

SEQ ID NO: 2968 - RNA, 19 nt, synthetic construct
  source 1..19: mol_type = other RNA
aggtgctggccacgccacg

SEQ ID NO: 2969 - RNA, 19 nt, synthetic construct
  source 1..19: mol_type = other RNA
gaggtgctggccacgccac

SEQ ID NO: 2970 - RNA, 19 nt, synthetic construct
  source 1..19: mol_type = other RNA
tgaggtgctggccacgcca

SEQ ID NO: 2971 - RNA, 19 nt, synthetic construct
  source 1..19: mol_type = other RNA
ctgaggtgctggccacgcc

SEQ ID NO: 2972 - RNA, 19 nt, synthetic construct
  source 1..19: mol_type = other RNA
gctgaggtgctggccacgc

SEQ ID NO: 2973 - RNA, 19 nt, synthetic construct
  source 1..19: mol_type = other RNA
ggctgaggtgctggccacg

SEQ ID NO: 2974 - RNA, 19 nt, synthetic construct
  source 1..19: mol_type = other RNA
aggctgaggtgctggccac

SEQ ID NO: 2975 - RNA, 19 nt, synthetic construct
  source 1..19: mol_type = other RNA
gaggctgaggtgctggcca

SEQ ID NO: 2976 - RNA, 19 nt, synthetic construct
  source 1..19: mol_type = other RNA
cgaggctgaggtgctggcc

SEQ ID NO: 2977 - RNA, 19 nt, synthetic construct
  source 1..19: mol_type = other RNA
ccgaggctgaggtgctggc

SEQ ID NO: 2978 - RNA, 19 nt, synthetic construct
  source 1..19: mol_type = other RNA
cccgaggctgaggtgctgg

SEQ ID NO: 2979 - RNA, 19 nt, synthetic construct
  source 1..19: mol_type = other RNA
gcccgaggctgaggtgctg

SEQ ID NO: 2980 - RNA, 19 nt, synthetic construct
  source 1..19: mol_type = other RNA
ggcccgaggctgaggtgct

SEQ ID NO: 2981 - RNA, 19 nt, synthetic construct
  source 1..19: mol_type = other RNA
aggcccgaggctgaggtgc

SEQ ID NO: 2982 - RNA, 19 nt, synthetic construct
  source 1..19: mol_type = other RNA
gaggcccgaggctgaggtg

SEQ ID NO: 2983 - RNA, 19 nt, synthetic construct
  source 1..19: mol_type = other RNA
tgaggcccgaggctgaggt

SEQ ID NO: 2984 - RNA, 19 nt, synthetic construct
  source 1..19: mol_type = other RNA
ctgaggcccgaggctgagg

SEQ ID NO: 2985 - RNA, 19 nt, synthetic construct
  source 1..19: mol_type = other RNA
gctgaggcccgaggctgag

SEQ ID NO: 2986 - RNA, 19 nt, synthetic construct
  source 1..19: mol_type = other RNA
agctgaggcccgaggctga

SEQ ID NO: 2987 - RNA, 19 nt, synthetic construct
  source 1..19: mol_type = other RNA
cagctgaggcccgaggctg

SEQ ID NO: 2988 - RNA, 19 nt, synthetic construct
  source 1..19: mol_type = other RNA
gcagctgaggcccgaggct

SEQ ID NO: 2989 - RNA, 19 nt, synthetic construct
  source 1..19: mol_type = other RNA
ggcagctgaggcccgaggc

SEQ ID NO: 2990 - RNA, 19 nt, synthetic construct
  source 1..19: mol_type = other RNA
aggcagctgaggcccgagg

SEQ ID NO: 2991 - RNA, 19 nt, synthetic construct
  source 1..19: mol_type = other RNA
caggcagctgaggcccgag

SEQ ID NO: 2992 - RNA, 19 nt, synthetic construct
  source 1..19: mol_type = other RNA
ccaggcagctgaggcccga

SEQ ID NO: 2993 - RNA, 19 nt, synthetic construct
  source 1..19: mol_type = other RNA
gccaggcagctgaggcccg

SEQ ID NO: 2994 - RNA, 19 nt, synthetic construct
  source 1..19: mol_type = other RNA
ggccaggcagctgaggccc

SEQ ID NO: 2995 - RNA, 19 nt, synthetic construct
  source 1..19: mol_type = other RNA
aggccaggcagctgaggcc

SEQ ID NO: 2996 - RNA, 19 nt, synthetic construct
  source 1..19: mol_type = other RNA
caggccaggcagctgaggc

SEQ ID NO: 2997 - RNA, 19 nt, synthetic construct
  source 1..19: mol_type = other RNA
ccaggccaggcagctgagg

SEQ ID NO: 2998 - RNA, 19 nt, synthetic construct
  source 1..19: mol_type = other RNA
tccaggccaggcagctgag

SEQ ID NO: 2999 - RNA, 19 nt, synthetic construct
  source 1..19: mol_type = other RNA
ttccaggccaggcagctga

SEQ ID NO: 3000 - RNA, 19 nt, synthetic construct
  source 1..19: mol_type = other RNA
gttccaggccaggcagctg

SEQ ID NO: 3001 - RNA, 19 nt, synthetic construct
  source 1..19: mol_type = other RNA
agttccaggccaggcagct

SEQ ID NO: 3002 - RNA, 19 nt, synthetic construct
  source 1..19: mol_type = other RNA
gagttccaggccaggcagc

SEQ ID NO: 3003 - RNA, 19 nt, synthetic construct
  source 1..19: mol_type = other RNA
ggagttccaggccaggcag

SEQ ID NO: 3004 - RNA, 19 nt, synthetic construct
  source 1..19: mol_type = other RNA
cggagttccaggccaggca

SEQ ID NO: 3005 - RNA, 19 nt, synthetic construct
  source 1..19: mol_type = other RNA
tcggagttccaggccaggc

SEQ ID NO: 3006 - RNA, 19 nt, synthetic construct
  source 1..19: mol_type = other RNA
atcggagttccaggccagg

SEQ ID NO: 3007 - RNA, 19 nt, synthetic construct
  source 1..19: mol_type = other RNA
gatcggagttccaggccag

SEQ ID NO: 3008 - RNA, 19 nt, synthetic construct
  source 1..19: mol_type = other RNA
agatcggagttccaggcca

SEQ ID NO: 3009 - RNA, 19 nt, synthetic construct
  source 1..19: mol_type = other RNA
cagatcggagttccaggcc

SEQ ID NO: 3010 - RNA, 19 nt, synthetic construct
  source 1..19: mol_type = other RNA
gcagatcggagttccaggc

SEQ ID NO: 3011 - RNA, 19 nt, synthetic construct
  source 1..19: mol_type = other RNA
agcagatcggagttccagg

SEQ ID NO: 3012 - RNA, 19 nt, synthetic construct
  source 1..19: mol_type = other RNA
gagcagatcggagttccag

SEQ ID NO: 3013 - RNA, 19 nt, synthetic construct
  source 1..19: mol_type = other RNA
agagcagatcggagttcca

SEQ ID NO: 3014 - RNA, 19 nt, synthetic construct
  source 1..19: mol_type = other RNA
tagagcagatcggagttcc

SEQ ID NO: 3015 - RNA, 19 nt, synthetic construct
  source 1..19: mol_type = other RNA
gtagagcagatcggagttc

SEQ ID NO: 3016 - RNA, 19 nt, synthetic construct
  source 1..19: mol_type = other RNA
ggtagagcagatcggagtt

SEQ ID NO: 3017 - RNA, 19 nt, synthetic construct
  source 1..19: mol_type = other RNA
tggtagagcagatcggagt

SEQ ID NO: 3018 - RNA, 19 nt, synthetic construct
  source 1..19: mol_type = other RNA
ctggtagagcagatcggag

SEQ ID NO: 3019 - RNA, 19 nt, synthetic construct
  source 1..19: mol_type = other RNA
cctggtagagcagatcgga

SEQ ID NO: 3020 - RNA, 19 nt, synthetic construct
  source 1..19: mol_type = other RNA
tcctggtagagcagatcgg

SEQ ID NO: 3021 - RNA, 19 nt, synthetic construct
  source 1..19: mol_type = other RNA
ctcctggtagagcagatcg

SEQ ID NO: 3022 - RNA, 19 nt, synthetic construct
  source 1..19: mol_type = other RNA
gctcctggtagagcagatc

SEQ ID NO: 3023 - RNA, 19 nt, synthetic construct
  source 1..19: mol_type = other RNA
agctcctggtagagcagat

SEQ ID NO: 3024 - RNA, 19 nt, synthetic construct
  source 1..19: mol_type = other RNA
cagctcctggtagagcaga

SEQ ID NO: 3025 - RNA, 19 nt, synthetic construct
  source 1..19: mol_type = other RNA
gcagctcctggtagagcag

SEQ ID NO: 3026 - RNA, 19 nt, synthetic construct
  source 1..19: mol_type = other RNA
tgcagctcctggtagagca

SEQ ID NO: 3027 - RNA, 19 nt, synthetic construct
  source 1..19: mol_type = other RNA
gtgcagctcctggtagagc

SEQ ID NO: 3028 - RNA, 19 nt, synthetic construct
  source 1..19: mol_type = other RNA
cgtgcagctcctggtagag

SEQ ID NO: 3029 - RNA, 19 nt, synthetic construct
  source 1..19: mol_type = other RNA
acgtgcagctcctggtaga

SEQ ID NO: 3030 - RNA, 19 nt, synthetic construct
  source 1..19: mol_type = other RNA
cacgtgcagctcctggtag

SEQ ID NO: 3031 - RNA, 19 nt, synthetic construct
  source 1..19: mol_type = other RNA
ccacgtgcagctcctggta

SEQ ID NO: 3032 - RNA, 19 nt, synthetic construct
  source 1..19: mol_type = other RNA
tccacgtgcagctcctggt

SEQ ID NO: 3033 - RNA, 19 nt, synthetic construct
  source 1..19: mol_type = other RNA
gtccacgtgcagctcctgg

SEQ ID NO: 3034 - RNA, 19 nt, synthetic construct
  source 1..19: mol_type = other RNA
agtccacgtgcagctcctg

SEQ ID NO: 3035 - RNA, 19 nt, synthetic construct
  source 1..19: mol_type = other RNA
gagtccacgtgcagctcct

SEQ ID NO: 3036 - RNA, 19 nt, synthetic construct
  source 1..19: mol_type = other RNA
ggagtccacgtgcagctcc

SEQ ID NO: 3037 - RNA, 19 nt, synthetic construct
  source 1..19: mol_type = other RNA
cggagtccacgtgcagctc

SEQ ID NO: 3038 - RNA, 19 nt, synthetic construct
  source 1..19: mol_type = other RNA
acggagtccacgtgcagct

SEQ ID NO: 3039 - RNA, 19 nt, synthetic construct
  source 1..19: mol_type = other RNA
cacggagtccacgtgcagc

SEQ ID NO: 3040 - RNA, 19 nt, synthetic construct
  source 1..19: mol_type = other RNA
ccacggagtccacgtgcag

SEQ ID NO: 3041 - RNA, 19 nt, synthetic construct
  source 1..19: mol_type = other RNA
cccacggagtccacgtgca

SEQ ID NO: 3042 - RNA, 19 nt, synthetic construct
  source 1..19: mol_type = other RNA
gcccacggagtccacgtgc

SEQ ID NO: 3043 - RNA, 19 nt, synthetic construct
  source 1..19: mol_type = other RNA
cgcccacggagtccacgtg

SEQ ID NO: 3044 - RNA, 19 nt, synthetic construct
  source 1..19: mol_type = other RNA
gcgcccacggagtccacgt

SEQ ID NO: 3045 - RNA, 19 nt, synthetic construct
  source 1..19: mol_type = other RNA
ggcgcccacggagtccacg

SEQ ID NO: 3046 - RNA, 19 nt, synthetic construct
  source 1..19: mol_type = other RNA
cggcgcccacggagtccac

SEQ ID NO: 3047 - RNA, 19 nt, synthetic construct
  source 1..19: mol_type = other RNA
gcggcgcccacggagtcca

SEQ ID NO: 3048 - RNA, 19 nt, synthetic construct
  source 1..19: mol_type = other RNA
cgcggcgcccacggagtcc

SEQ ID NO: 3049 - RNA, 19 nt, synthetic construct
  source 1..19: mol_type = other RNA
ccgcggcgcccacggagtc

SEQ ID NO: 3050 - RNA, 19 nt, synthetic construct
  source 1..19: mol_type = other RNA
gccgcggcgcccacggagt

SEQ ID NO: 3051 - RNA, 19 nt, synthetic construct
  source 1..19: mol_type = other RNA
ggccgcggcgcccacggag

SEQ ID NO: 3052 - RNA, 19 nt, synthetic construct
  source 1..19: mol_type = other RNA
gggccgcggcgcccacgga

SEQ ID NO: 3053 - RNA, 19 nt, synthetic construct
  source 1..19: mol_type = other RNA
agggccgcggcgcccacgg

SEQ ID NO: 3054 - RNA, 19 nt, synthetic construct
  source 1..19: mol_type = other RNA
cagggccgcggcgcccacg

SEQ ID NO: 3055 - RNA, 19 nt, synthetic construct
  source 1..19: mol_type = other RNA
gcagggccgcggcgcccac

SEQ ID NO: 3056 - RNA, 19 nt, synthetic construct
  source 1..19: mol_type = other RNA
agcagggccgcggcgccca

SEQ ID NO: 3057 - RNA, 19 nt, synthetic construct
  source 1..19: mol_type = other RNA
cagcagggccgcggcgccc

SEQ ID NO: 3058 - RNA, 19 nt, synthetic construct
  source 1..19: mol_type = other RNA
ccagcagggccgcggcgcc

SEQ ID NO: 3059 - RNA, 19 nt, synthetic construct
  source 1..19: mol_type = other RNA
cccagcagggccgcggcgc

SEQ ID NO: 3060 - RNA, 19 nt, synthetic construct
  source 1..19: mol_type = other RNA
gcccagcagggccgcggcg

SEQ ID NO: 3061 - RNA, 19 nt, synthetic construct
  source 1..19: mol_type = other RNA
ggcccagcagggccgcggc

SEQ ID NO: 3062 - RNA, 19 nt, synthetic construct
  source 1..19: mol_type = other RNA
aggcccagcagggccgcgg

SEQ ID NO: 3063 - RNA, 19 nt, synthetic construct
  source 1..19: mol_type = other RNA
caggcccagcagggccgcg

SEQ ID NO: 3064 - RNA, 19 nt, synthetic construct
  source 1..19: mol_type = other RNA
ccaggcccagcagggccgc

SEQ ID NO: 3065 - RNA, 19 nt, synthetic construct
  source 1..19: mol_type = other RNA
cccaggcccagcagggccg

SEQ ID NO: 3066 - RNA, 19 nt, synthetic construct
  source 1..19: mol_type = other RNA
gcccaggcccagcagggcc

SEQ ID NO: 3067 - RNA, 19 nt, synthetic construct
  source 1..19: mol_type = other RNA
ggcccaggcccagcagggc

SEQ ID NO: 3068 - RNA, 19 nt, synthetic construct
  source 1..19: mol_type = other RNA
gggcccaggcccagcaggg

SEQ ID NO: 3069 - RNA, 19 nt, synthetic construct
  source 1..19: mol_type = other RNA
ggggcccaggcccagcagg

SEQ ID NO: 3070 - RNA, 19 nt, synthetic construct
  source 1..19: mol_type = other RNA
gggggcccaggcccagcag

SEQ ID NO: 3071 - RNA, 19 nt, synthetic construct
  source 1..19: mol_type = other RNA
tgggggcccaggcccagca

SEQ ID NO: 3072 - RNA, 19 nt, synthetic construct
  source 1..19: mol_type = other RNA
atgggggcccaggcccagc

SEQ ID NO: 3073 - RNA, 19 nt, synthetic construct
  source 1..19: mol_type = other RNA
catgggggcccaggcccag

SEQ ID NO: 3074 - RNA, 19 nt, synthetic construct
  source 1..19: mol_type = other RNA
gcatgggggcccaggccca

SEQ ID NO: 3075 - RNA, 19 nt, synthetic construct
  source 1..19: mol_type = other RNA
ggcatgggggcccaggccc

SEQ ID NO: 3076 - RNA, 19 nt, synthetic construct
  source 1..19: mol_type = other RNA
aggcatgggggcccaggcc

SEQ ID NO: 3077 - RNA, 19 nt, synthetic construct
  source 1..19: mol_type = other RNA
taggcatgggggcccaggc

SEQ ID NO: 3078 - RNA, 19 nt, synthetic construct
  source 1..19: mol_type = other RNA
gtaggcatgggggcccagg

SEQ ID NO: 3079 - RNA, 19 nt, synthetic construct
  source 1..19: mol_type = other RNA
agtaggcatgggggcccag

SEQ ID NO: 3080 - RNA, 19 nt, synthetic construct
  source 1..19: mol_type = other RNA
cagtaggcatgggggccca

SEQ ID NO: 3081 - RNA, 19 nt, synthetic construct
  source 1..19: mol_type = other RNA
gcagtaggcatgggggccc

SEQ ID NO: 3082 - RNA, 19 nt, synthetic construct
  source 1..19: mol_type = other RNA
ggcagtaggcatgggggcc

SEQ ID NO: 3083 - RNA, 19 nt, synthetic construct
  source 1..19: mol_type = other RNA
cggcagtaggcatgggggc

SEQ ID NO: 3084 - RNA, 19 nt, synthetic construct
  source 1..19: mol_type = other RNA
ccggcagtaggcatggggg

SEQ ID NO: 3085 - RNA, 19 nt, synthetic construct
  source 1..19: mol_type = other RNA
tccggcagtaggcatgggg

SEQ ID NO: 3086 - RNA, 19 nt, synthetic construct
  source 1..19: mol_type = other RNA
ttccggcagtaggcatggg

SEQ ID NO: 3087 - RNA, 19 nt, synthetic construct
  source 1..19: mol_type = other RNA
attccggcagtaggcatgg

SEQ ID NO: 3088 - RNA, 19 nt, synthetic construct
  source 1..19: mol_type = other RNA
gattccggcagtaggcatg

SEQ ID NO: 3089 - RNA, 19 nt, synthetic construct
  source 1..19: mol_type = other RNA
ggattccggcagtaggcat

SEQ ID NO: 3090 - RNA, 19 nt, synthetic construct
  source 1..19: mol_type = other RNA
cggattccggcagtaggca

SEQ ID NO: 3091 - RNA, 19 nt, synthetic construct
  source 1..19: mol_type = other RNA
ccggattccggcagtaggc

SEQ ID NO: 3092 - RNA, 19 nt, synthetic construct
  source 1..19: mol_type = other RNA
tccggattccggcagtagg

SEQ ID NO: 3093 - RNA, 19 nt, synthetic construct
  source 1..19: mol_type = other RNA
gtccggattccggcagtag

SEQ ID NO: 3094 - RNA, 19 nt, synthetic construct
  source 1..19: mol_type = other RNA
tgtccggattccggcagta

SEQ ID NO: 3095 - RNA, 19 nt, synthetic construct
  source 1..19: mol_type = other RNA
ttgtccggattccggcagt

SEQ ID NO: 3096 - RNA, 19 nt, synthetic construct
  source 1..19: mol_type = other RNA
attgtccggattccggcag

SEQ ID NO: 3097 - RNA, 19 nt, synthetic construct
  source 1..19: mol_type = other RNA
cattgtccggattccggca

SEQ ID NO: 3098 - RNA, 19 nt, synthetic construct
  source 1..19: mol_type = other RNA
tcattgtccggattccggc

SEQ ID NO: 3099 - RNA, 19 nt, synthetic construct
  source 1..19: mol_type = other RNA
gtcattgtccggattccgg

SEQ ID NO: 3100 - RNA, 19 nt, synthetic construct
  source 1..19: mol_type = other RNA
cgtcattgtccggattccg

SEQ ID NO: 3101 - RNA, 19 nt, synthetic construct
  source 1..19: mol_type = other RNA
tcgtcattgtccggattcc

SEQ ID NO: 3102 - RNA, 19 nt, synthetic construct
  source 1..19: mol_type = other RNA
ctcgtcattgtccggattc

SEQ ID NO: 3103 - RNA, 19 nt, synthetic construct
  source 1..19: mol_type = other RNA
tctcgtcattgtccggatt

SEQ ID NO: 3104 - RNA, 19 nt, synthetic construct
  source 1..19: mol_type = other RNA
ctctcgtcattgtccggat

SEQ ID NO: 3105 - RNA, 19 nt, synthetic construct
  source 1..19: mol_type = other RNA
cctctcgtcattgtccgga

SEQ ID NO: 3106 - RNA, 19 nt, synthetic construct
  source 1..19: mol_type = other RNA
gcctctcgtcattgtccgg

SEQ ID NO: 3107 - RNA, 19 nt, synthetic construct
  source 1..19: mol_type = other RNA
ggcctctcgtcattgtccg

SEQ ID NO: 3108 - RNA, 19 nt, synthetic construct
  source 1..19: mol_type = other RNA
gggcctctcgtcattgtcc

SEQ ID NO: 3109 - RNA, 19 nt, synthetic construct
  source 1..19: mol_type = other RNA
agggcctctcgtcattgtc

SEQ ID NO: 3110 - RNA, 19 nt, synthetic construct
  source 1..19: mol_type = other RNA
cagggcctctcgtcattgt

SEQ ID NO: 3111 - RNA, 19 nt, synthetic construct
  source 1..19: mol_type = other RNA
ccagggcctctcgtcattg

SEQ ID NO: 3112 - RNA, 19 nt, synthetic construct
  source 1..19: mol_type = other RNA
accagggcctctcgtcatt

SEQ ID NO: 3113 - RNA, 19 nt, synthetic construct
  source 1..19: mol_type = other RNA
caccagggcctctcgtcat

SEQ ID NO: 3114 - RNA, 19 nt, synthetic construct
  source 1..19: mol_type = other RNA
gcaccagggcctctcgtca

SEQ ID NO: 3115 - RNA, 19 nt, synthetic construct
  source 1..19: mol_type = other RNA
agcaccagggcctctcgtc

SEQ ID NO: 3116 - RNA, 19 nt, synthetic construct
  source 1..19: mol_type = other RNA
tagcaccagggcctctcgt

SEQ ID NO: 3117 - RNA, 19 nt, synthetic construct
  source 1..19: mol_type = other RNA
gtagcaccagggcctctcg

SEQ ID NO: 3118 - RNA, 19 nt, synthetic construct
  source 1..19: mol_type = other RNA
cgtagcaccagggcctctc

SEQ ID NO: 3119 - RNA, 19 nt, synthetic construct
  source 1..19: mol_type = other RNA
acgtagcaccagggcctct

SEQ ID NO: 3120 - RNA, 19 nt, synthetic construct
  source 1..19: mol_type = other RNA
cacgtagcaccagggcctc

SEQ ID NO: 3121 - RNA, 19 nt, synthetic construct
  source 1..19: mol_type = other RNA
ccacgtagcaccagggcct

SEQ ID NO: 3122 - RNA, 19 nt, synthetic construct
  source 1..19: mol_type = other RNA
accacgtagcaccagggcc

SEQ ID NO: 3123 - RNA, 19 nt, synthetic construct
  source 1..19: mol_type = other RNA
caccacgtagcaccagggc

SEQ ID NO: 3124 - RNA, 19 nt, synthetic construct
  source 1..19: mol_type = other RNA
tcaccacgtagcaccaggg

SEQ ID NO: 3125 - RNA, 19 nt, synthetic construct
  source 1..19: mol_type = other RNA
ttcaccacgtagcaccagg

SEQ ID NO: 3126 - RNA, 19 nt, synthetic construct
  source 1..19: mol_type = other RNA
cttcaccacgtagcaccag

SEQ ID NO: 3127 - RNA, 19 nt, synthetic construct
  source 1..19: mol_type = other RNA
ccttcaccacgtagcacca

SEQ ID NO: 3128 - RNA, 19 nt, synthetic construct
  source 1..19: mol_type = other RNA
tccttcaccacgtagcacc

SEQ ID NO: 3129 - RNA, 19 nt, synthetic construct
  source 1..19: mol_type = other RNA
gtccttcaccacgtagcac

SEQ ID NO: 3130 - RNA, 19 nt, synthetic construct
  source 1..19: mol_type = other RNA
tgtccttcaccacgtagca

SEQ ID NO: 3131 - RNA, 19 nt, synthetic construct
  source 1..19: mol_type = other RNA
ctgtccttcaccacgtagc

SEQ ID NO: 3132 - RNA, 19 nt, synthetic construct
  source 1..19: mol_type = other RNA
gctgtccttcaccacgtag

SEQ ID NO: 3133 - RNA, 19 nt, synthetic construct
  source 1..19: mol_type = other RNA
cgctgtccttcaccacgta

SEQ ID NO: 3134 - RNA, 19 nt, synthetic construct
  source 1..19: mol_type = other RNA
gcgctgtccttcaccacgt

SEQ ID NO: 3135 - RNA, 19 nt, synthetic construct
  source 1..19: mol_type = other RNA
cgcgctgtccttcaccacg

SEQ ID NO: 3136 - RNA, 19 nt, synthetic construct
  source 1..19: mol_type = other RNA
gcgcgctgtccttcaccac

SEQ ID NO: 3137 - RNA, 19 nt, synthetic construct
  source 1..19: mol_type = other RNA
agcgcgctgtccttcacca

SEQ ID NO: 3138 - RNA, 19 nt, synthetic construct
  source 1..19: mol_type = other RNA
gagcgcgctgtccttcacc

SEQ ID NO: 3139 - RNA, 19 nt, synthetic construct
  source 1..19: mol_type = other RNA
agagcgcgctgtccttcac

SEQ ID NO: 3140 - RNA, 19 nt, synthetic construct
  source 1..19: mol_type = other RNA
gagagcgcgctgtccttca

SEQ ID NO: 3141 - RNA, 19 nt, synthetic construct
  source 1..19: mol_type = other RNA
ggagagcgcgctgtccttc

SEQ ID NO: 3142 - RNA, 19 nt, synthetic construct
  source 1..19: mol_type = other RNA
aggagagcgcgctgtcctt

SEQ ID NO: 3143 - RNA, 19 nt, synthetic construct
  source 1..19: mol_type = other RNA
caggagagcgcgctgtcct

SEQ ID NO: 3144 - RNA, 19 nt, synthetic construct
  source 1..19: mol_type = other RNA
ccaggagagcgcgctgtcc

SEQ ID NO: 3145 - RNA, 19 nt, synthetic construct
  source 1..19: mol_type = other RNA
cccaggagagcgcgctgtc

SEQ ID NO: 3146 - RNA, 19 nt, synthetic construct
  source 1..19: mol_type = other RNA
tcccaggagagcgcgctgt

SEQ ID NO: 3147 - RNA, 19 nt, synthetic construct
  source 1..19: mol_type = other RNA
ctcccaggagagcgcgctg

SEQ ID NO: 3148 - RNA, 19 nt, synthetic construct
  source 1..19: mol_type = other RNA
actcccaggagagcgcgct

SEQ ID NO: 3149 - RNA, 19 nt, synthetic construct
  source 1..19: mol_type = other RNA
tactcccaggagagcgcgc

SEQ ID NO: 3150 - RNA, 19 nt, synthetic construct
  source 1..19: mol_type = other RNA
gtactcccaggagagcgcg

SEQ ID NO: 3151 - RNA, 19 nt, synthetic construct
  source 1..19: mol_type = other RNA
agtactcccaggagagcgc

SEQ ID NO: 3152 - RNA, 19 nt, synthetic construct
  source 1..19: mol_type = other RNA
cagtactcccaggagagcg

SEQ ID NO: 3153 - RNA, 19 nt, synthetic construct
  source 1..19: mol_type = other RNA
gcagtactcccaggagagc

SEQ ID NO: 3154 - RNA, 19 nt, synthetic construct
  source 1..19: mol_type = other RNA
ggcagtactcccaggagag

SEQ ID NO: 3155 - RNA, 19 nt, synthetic construct
  source 1..19: mol_type = other RNA
cggcagtactcccaggaga

SEQ ID NO: 3156 - RNA, 19 nt, synthetic construct
  source 1..19: mol_type = other RNA
gcggcagtactcccaggag

SEQ ID NO: 3157 - RNA, 19 nt, synthetic construct
  source 1..19: mol_type = other RNA
ggcggcagtactcccagga

SEQ ID NO: 3158 - RNA, 19 nt, synthetic construct
  source 1..19: mol_type = other RNA
aggcggcagtactcccagg

SEQ ID NO: 3159 - RNA, 19 nt, synthetic construct
  source 1..19: mol_type = other RNA
caggcggcagtactcccag

SEQ ID NO: 3160 - RNA, 19 nt, synthetic construct
  source 1..19: mol_type = other RNA
ccaggcggcagtactccca

SEQ ID NO: 3161 - RNA, 19 nt, synthetic construct
  source 1..19: mol_type = other RNA
tccaggcggcagtactccc

SEQ ID NO: 3162 - RNA, 19 nt, synthetic construct
  source 1..19: mol_type = other RNA
ctccaggcggcagtactcc

SEQ ID NO: 3163 - RNA, 19 nt, synthetic construct
  source 1..19: mol_type = other RNA
cctccaggcggcagtactc

SEQ ID NO: 3164 - RNA, 19 nt, synthetic construct
  source 1..19: mol_type = other RNA
gcctccaggcggcagtact

SEQ ID NO: 3165 - RNA, 19 nt, synthetic construct
  source 1..19: mol_type = other RNA
ggcctccaggcggcagtac

SEQ ID NO: 3166 - RNA, 19 nt, synthetic construct
  source 1..19: mol_type = other RNA
aggcctccaggcggcagta

SEQ ID NO: 3167 - RNA, 19 nt, synthetic construct
  source 1..19: mol_type = other RNA
caggcctccaggcggcagt

SEQ ID NO: 3168 - RNA, 19 nt, synthetic construct
  source 1..19: mol_type = other RNA
gcaggcctccaggcggcag

SEQ ID NO: 3169 - RNA, 19 nt, synthetic construct
  source 1..19: mol_type = other RNA
cgcaggcctccaggcggca

SEQ ID NO: 3170 - RNA, 19 nt, synthetic construct
  source 1..19: mol_type = other RNA
tcgcaggcctccaggcggc

SEQ ID NO: 3171 - RNA, 19 nt, synthetic construct
  source 1..19: mol_type = other RNA
ttcgcaggcctccaggcgg

SEQ ID NO: 3172 - RNA, 19 nt, synthetic construct
  source 1..19: mol_type = other RNA
attcgcaggcctccaggcg

SEQ ID NO: 3173 - RNA, 19 nt, synthetic construct
  source 1..19: mol_type = other RNA
gattcgcaggcctccaggc

SEQ ID NO: 3174 - RNA, 19 nt, synthetic construct
  source 1..19: mol_type = other RNA
ggattcgcaggcctccagg

SEQ ID NO: 3175 - RNA, 19 nt, synthetic construct
  source 1..19: mol_type = other RNA
gggattcgcaggcctccag

SEQ ID NO: 3176 - RNA, 19 nt, synthetic construct
  source 1..19: mol_type = other RNA
agggattcgcaggcctcca

SEQ ID NO: 3177 - RNA, 19 nt, synthetic construct
  source 1..19: mol_type = other RNA
gagggattcgcaggcctcc

SEQ ID NO: 3178 - RNA, 19 nt, synthetic construct
  source 1..19: mol_type = other RNA
tgagggattcgcaggcctc

SEQ ID NO: 3179 - RNA, 19 nt, synthetic construct
  source 1..19: mol_type = other RNA
gtgagggattcgcaggcct

SEQ ID NO: 3180 - RNA, 19 nt, synthetic construct
  source 1..19: mol_type = other RNA
ggtgagggattcgcaggcc

SEQ ID NO: 3181 - RNA, 19 nt, synthetic construct
  source 1..19: mol_type = other RNA
tggtgagggattcgcaggc

SEQ ID NO: 3182 - RNA, 19 nt, synthetic construct
  source 1..19: mol_type = other RNA
ctggtgagggattcgcagg

SEQ ID NO: 3183 - RNA, 19 nt, synthetic construct
  source 1..19: mol_type = other RNA
tctggtgagggattcgcag

SEQ ID NO: 3184 - RNA, 19 nt, synthetic construct
  source 1..19: mol_type = other RNA
ctctggtgagggattcgca

SEQ ID NO: 3185 - RNA, 19 nt, synthetic construct
  source 1..19: mol_type = other RNA
actctggtgagggattcgc

SEQ ID NO: 3186 - RNA, 19 nt, synthetic construct
  source 1..19: mol_type = other RNA
gactctggtgagggattcg

SEQ ID NO: 3187 - RNA, 19 nt, synthetic construct
  source 1..19: mol_type = other RNA
ggactctggtgagggattc

SEQ ID NO: 3188 - RNA, 19 nt, synthetic construct
  source 1..19: mol_type = other RNA
tggactctggtgagggatt

SEQ ID NO: 3189 - RNA, 19 nt, synthetic construct
  source 1..19: mol_type = other RNA
ttggactctggtgagggat

SEQ ID NO: 3190 - RNA, 19 nt, synthetic construct
  source 1..19: mol_type = other RNA
gttggactctggtgaggga

SEQ ID NO: 3191 - RNA, 19 nt, synthetic construct
  source 1..19: mol_type = other RNA
agttggactctggtgaggg

SEQ ID NO: 3192 - RNA, 19 nt, synthetic construct
  source 1..19: mol_type = other RNA
cagttggactctggtgagg

SEQ ID NO: 3193 - RNA, 19 nt, synthetic construct
  source 1..19: mol_type = other RNA
acagttggactctggtgag

SEQ ID NO: 3194 - RNA, 19 nt, synthetic construct
  source 1..19: mol_type = other RNA
gacagttggactctggtga

SEQ ID NO: 3195 - RNA, 19 nt, synthetic construct
  source 1..19: mol_type = other RNA
tgacagttggactctggtg

SEQ ID NO: 3196 - RNA, 19 nt, synthetic construct
  source 1..19: mol_type = other RNA
gtgacagttggactctggt

SEQ ID NO: 3197 - RNA, 19 nt, synthetic construct
  source 1..19: mol_type = other RNA
ggtgacagttggactctgg

SEQ ID NO: 3198 - RNA, 19 nt, synthetic construct
  source 1..19: mol_type = other RNA
cggtgacagttggactctg

SEQ ID NO: 3199 - RNA, 19 nt, synthetic construct
  source 1..19: mol_type = other RNA
ccggtgacagttggactct

SEQ ID NO: 3200 - RNA, 19 nt, synthetic construct
  source 1..19: mol_type = other RNA
tccggtgacagttggactc

SEQ ID NO: 3201 - RNA, 19 nt, synthetic construct
  source 1..19: mol_type = other RNA
atccggtgacagttggact

SEQ ID NO: 3202 - RNA, 19 nt, synthetic construct
  source 1..19: mol_type = other RNA
gatccggtgacagttggac

SEQ ID NO: 3203 - RNA, 19 nt, synthetic construct
  source 1..19: mol_type = other RNA
agatccggtgacagttgga

SEQ ID NO: 3204 - RNA, 19 nt, synthetic construct
  source 1..19: mol_type = other RNA
gagatccggtgacagttgg

SEQ ID NO: 3205 - RNA, 19 nt, synthetic construct
  source 1..19: mol_type = other RNA
ggagatccggtgacagttg

SEQ ID NO: 3206 - RNA, 19 nt, synthetic construct
  source 1..19: mol_type = other RNA
aggagatccggtgacagtt

SEQ ID NO: 3207 - RNA, 19 nt, synthetic construct
  source 1..19: mol_type = other RNA
caggagatccggtgacagt

SEQ ID NO: 3208 - RNA, 19 nt, synthetic construct
  source 1..19: mol_type = other RNA
ccaggagatccggtgacag

SEQ ID NO: 3209 - RNA, 19 nt, synthetic construct
  source 1..19: mol_type = other RNA
gccaggagatccggtgaca

SEQ ID NO: 3210 - RNA, 19 nt, synthetic construct
  source 1..19: mol_type = other RNA
cgccaggagatccggtgac

SEQ ID NO: 3211 - RNA, 19 nt, synthetic construct
  source 1..19: mol_type = other RNA
tcgccaggagatccggtga

SEQ ID NO: 3212 - RNA, 19 nt, synthetic construct
  source 1..19: mol_type = other RNA
gtcgccaggagatccggtg

SEQ ID NO: 3213 - RNA, 19 nt, synthetic construct
  source 1..19: mol_type = other RNA
ggtcgccaggagatccggt

SEQ ID NO: 3214 - RNA, 19 nt, synthetic construct
  source 1..19: mol_type = other RNA
gggtcgccaggagatccgg

SEQ ID NO: 3215 - RNA, 19 nt, synthetic construct
  source 1..19: mol_type = other RNA
agggtcgccaggagatccg

SEQ ID NO: 3216 - RNA, 19 nt, synthetic construct
  source 1..19: mol_type = other RNA
cagggtcgccaggagatcc

SEQ ID NO: 3217 - RNA, 19 nt, synthetic construct
  source 1..19: mol_type = other RNA
gcagggtcgccaggagatc

SEQ ID NO: 3218 - RNA, 19 nt, synthetic construct
  source 1..19: mol_type = other RNA
ggcagggtcgccaggagat

SEQ ID NO: 3219 - RNA, 19 nt, synthetic construct
  source 1..19: mol_type = other RNA
aggcagggtcgccaggaga

SEQ ID NO: 3220 - RNA, 19 nt, synthetic construct
  source 1..19: mol_type = other RNA
caggcagggtcgccaggag

SEQ ID NO: 3221 - RNA, 19 nt, synthetic construct
  source 1..19: mol_type = other RNA
tcaggcagggtcgccagga

SEQ ID NO: 3222 - RNA, 19 nt, synthetic construct
  source 1..19: mol_type = other RNA
ctcaggcagggtcgccagg

SEQ ID NO: 3223 - RNA, 19 nt, synthetic construct
  source 1..19: mol_type = other RNA
gctcaggcagggtcgccag

SEQ ID NO: 3224 - RNA, 19 nt, synthetic construct
  source 1..19: mol_type = other RNA
ggctcaggcagggtcgcca

SEQ ID NO: 3225 - RNA, 19 nt, synthetic construct
  source 1..19: mol_type = other RNA
tggctcaggcagggtcgcc

SEQ ID NO: 3226 - RNA, 19 nt, synthetic construct
  source 1..19: mol_type = other RNA
ctggctcaggcagggtcgc

SEQ ID NO: 3227 - RNA, 19 nt, synthetic construct
  source 1..19: mol_type = other RNA
gctggctcaggcagggtcg

SEQ ID NO: 3228 - RNA, 19 nt, synthetic construct
  source 1..19: mol_type = other RNA
ggctggctcaggcagggtc

SEQ ID NO: 3229 - RNA, 19 nt, synthetic construct
  source 1..19: mol_type = other RNA
aggctggctcaggcagggt

SEQ ID NO: 3230 - RNA, 19 nt, synthetic construct
  source 1..19: mol_type = other RNA
gaggctggctcaggcaggg

SEQ ID NO: 3231 - RNA, 19 nt, synthetic construct
  source 1..19: mol_type = other RNA
ggaggctggctcaggcagg

SEQ ID NO: 3232 - RNA, 19 nt, synthetic construct
  source 1..19: mol_type = other RNA
gggaggctggctcaggcag

SEQ ID NO: 3233 - RNA, 19 nt, synthetic construct
  source 1..19: mol_type = other RNA
ggggaggctggctcaggca

SEQ ID NO: 3234 - RNA, 19 nt, synthetic construct
  source 1..19: mol_type = other RNA
cggggaggctggctcaggc

SEQ ID NO: 3235 - RNA, 19 nt, synthetic construct
  source 1..19: mol_type = other RNA
ccggggaggctggctcagg

SEQ ID NO: 3236 - RNA, 19 nt, synthetic construct
  source 1..19: mol_type = other RNA
cccggggaggctggctcag

SEQ ID NO: 3237 - RNA, 19 nt, synthetic construct
  source 1..19: mol_type = other RNA
ccccggggaggctggctca

SEQ ID NO: 3238 - RNA, 19 nt, synthetic construct
  source 1..19: mol_type = other RNA
gccccggggaggctggctc

SEQ ID NO: 3239 - RNA, 19 nt, synthetic construct
  source 1..19: mol_type = other RNA
cgccccggggaggctggct

SEQ ID NO: 3240 - RNA, 19 nt, synthetic construct
  source 1..19: mol_type = other RNA
gcgccccggggaggctggc

SEQ ID NO: 3241 - RNA, 19 nt, synthetic construct
  source 1..19: mol_type = other RNA
ggcgccccggggaggctgg

SEQ ID NO: 3242 - RNA, 19 nt, synthetic construct
  source 1..19: mol_type = other RNA
tggcgccccggggaggctg

SEQ ID NO: 3243 - RNA, 19 nt, synthetic construct
  source 1..19: mol_type = other RNA
ctggcgccccggggaggct

SEQ ID NO: 3244 - RNA, 19 nt, synthetic construct
  source 1..19: mol_type = other RNA
cctggcgccccggggaggc

SEQ ID NO: 3245 - RNA, 19 nt, synthetic construct
  source 1..19: mol_type = other RNA
gcctggcgccccggggagg

SEQ ID NO: 3246 - RNA, 19 nt, synthetic construct
  source 1..19: mol_type = other RNA
ggcctggcgccccggggag

SEQ ID NO: 3247 - RNA, 19 nt, synthetic construct
  source 1..19: mol_type = other RNA
aggcctggcgccccgggga

SEQ ID NO: 3248 - RNA, 19 nt, synthetic construct
  source 1..19: mol_type = other RNA
caggcctggcgccccgggg

SEQ ID NO: 3249 - RNA, 19 nt, synthetic construct
  source 1..19: mol_type = other RNA
gcaggcctggcgccccggg

SEQ ID NO: 3250 - RNA, 19 nt, synthetic construct
  source 1..19: mol_type = other RNA
cgcaggcctggcgccccgg

SEQ ID NO: 3251 - RNA, 19 nt, synthetic construct
  source 1..19: mol_type = other RNA
ccgcaggcctggcgccccg

SEQ ID NO: 3252 - RNA, 19 nt, synthetic construct
  source 1..19: mol_type = other RNA
gccgcaggcctggcgcccc

SEQ ID NO: 3253 - RNA, 19 nt, synthetic construct
  source 1..19: mol_type = other RNA
tgccgcaggcctggcgccc

SEQ ID NO: 3254 - RNA, 19 nt, synthetic construct
  source 1..19: mol_type = other RNA
ctgccgcaggcctggcgcc

SEQ ID NO: 3255 - RNA, 19 nt, synthetic construct
  source 1..19: mol_type = other RNA
cctgccgcaggcctggcgc

SEQ ID NO: 3256 - RNA, 19 nt, synthetic construct
  source 1..19: mol_type = other RNA
tcctgccgcaggcctggcg

SEQ ID NO: 3257 - RNA, 19 nt, synthetic construct
  source 1..19: mol_type = other RNA
ctcctgccgcaggcctggc

SEQ ID NO: 3258 - RNA, 19 nt, synthetic construct
  source 1..19: mol_type = other RNA
cctcctgccgcaggcctgg

SEQ ID NO: 3259 - RNA, 19 nt, synthetic construct
  source 1..19: mol_type = other RNA
gcctcctgccgcaggcctg

SEQ ID NO: 3260 - RNA, 19 nt, synthetic construct
  source 1..19: mol_type = other RNA
tgcctcctgccgcaggcct

SEQ ID NO: 3261 - RNA, 19 nt, synthetic construct
  source 1..19: mol_type = other RNA
gtgcctcctgccgcaggcc

SEQ ID NO: 3262 - RNA, 19 nt, synthetic construct
  source 1..19: mol_type = other RNA
tgtgcctcctgccgcaggc

SEQ ID NO: 3263 - RNA, 19 nt, synthetic construct
  source 1..19: mol_type = other RNA
ttgtgcctcctgccgcagg

SEQ ID NO: 3264 - RNA, 19 nt, synthetic construct
  source 1..19: mol_type = other RNA
cttgtgcctcctgccgcag

SEQ ID NO: 3265 - RNA, 19 nt, synthetic construct
  source 1..19: mol_type = other RNA
tcttgtgcctcctgccgca

SEQ ID NO: 3266 - RNA, 19 nt, synthetic construct
  source 1..19: mol_type = other RNA
ttcttgtgcctcctgccgc

SEQ ID NO: 3267 - RNA, 19 nt, synthetic construct
  source 1..19: mol_type = other RNA
cttcttgtgcctcctgccg

SEQ ID NO: 3268 - RNA, 19 nt, synthetic construct
  source 1..19: mol_type = other RNA
tcttcttgtgcctcctgcc

SEQ ID NO: 3269 - RNA, 19 nt, synthetic construct
  source 1..19: mol_type = other RNA
ctcttcttgtgcctcctgc

SEQ ID NO: 3270 - RNA, 19 nt, synthetic construct
  source 1..19: mol_type = other RNA
cctcttcttgtgcctcctg

SEQ ID NO: 3271 - RNA, 19 nt, synthetic construct
  source 1..19: mol_type = other RNA
tcctcttcttgtgcctcct

SEQ ID NO: 3272 - RNA, 19 nt, synthetic construct
  source 1..19: mol_type = other RNA
gtcctcttcttgtgcctcc

SEQ ID NO: 3273 - RNA, 19 nt, synthetic construct
  source 1..19: mol_type = other RNA
cgtcctcttcttgtgcctc

SEQ ID NO: 3274 - RNA, 19 nt, synthetic construct
  source 1..19: mol_type = other RNA
acgtcctcttcttgtgcct

SEQ ID NO: 3275 - RNA, 19 nt, synthetic construct
  source 1..19: mol_type = other RNA
aacgtcctcttcttgtgcc

SEQ ID NO: 3276 - RNA, 19 nt, synthetic construct
  source 1..19: mol_type = other RNA
gaacgtcctcttcttgtgc

SEQ ID NO: 3277 - RNA, 19 nt, synthetic construct
  source 1..19: mol_type = other RNA
ggaacgtcctcttcttgtg

SEQ ID NO: 3278 - RNA, 19 nt, synthetic construct
  source 1..19: mol_type = other RNA
aggaacgtcctcttcttgt

SEQ ID NO: 3279 - RNA, 19 nt, synthetic construct
  source 1..19: mol_type = other RNA
caggaacgtcctcttcttg

SEQ ID NO: 3280 - RNA, 19 nt, synthetic construct
  source 1..19: mol_type = other RNA
gcaggaacgtcctcttctt

SEQ ID NO: 3281 - RNA, 19 nt, synthetic construct
  source 1..19: mol_type = other RNA
cgcaggaacgtcctcttct

SEQ ID NO: 3282 - RNA, 19 nt, synthetic construct
  source 1..19: mol_type = other RNA
ccgcaggaacgtcctcttc

SEQ ID NO: 3283 - RNA, 19 nt, synthetic construct
  source 1..19: mol_type = other RNA
gccgcaggaacgtcctctt

SEQ ID NO: 3284 - RNA, 19 nt, synthetic construct
  source 1..19: mol_type = other RNA
ggccgcaggaacgtcctct

SEQ ID NO: 3285 - RNA, 19 nt, synthetic construct
  source 1..19: mol_type = other RNA
tggccgcaggaacgtcctc

SEQ ID NO: 3286 - RNA, 19 nt, synthetic construct
  source 1..19: mol_type = other RNA
gtggccgcaggaacgtcct

SEQ ID NO: 3287 - RNA, 19 nt, synthetic construct
  source 1..19: mol_type = other RNA
cgtggccgcaggaacgtcc

SEQ ID NO: 3288 - RNA, 19 nt, synthetic construct
  source 1..19: mol_type = other RNA
acgtggccgcaggaacgtc

SEQ ID NO: 3289 - RNA, 19 nt, synthetic construct
  source 1..19: mol_type = other RNA
tacgtggccgcaggaacgt

SEQ ID NO: 3290 - RNA, 19 nt, synthetic construct
  source 1..19: mol_type = other RNA
atacgtggccgcaggaacg

SEQ ID NO: 3291 - RNA, 19 nt, synthetic construct
  source 1..19: mol_type = other RNA
gatacgtggccgcaggaac

SEQ ID NO: 3292 - RNA, 19 nt, synthetic construct
  source 1..19: mol_type = other RNA
tgatacgtggccgcaggaa

SEQ ID NO: 3293 - RNA, 19 nt, synthetic construct
  source 1..19: mol_type = other RNA
atgatacgtggccgcagga

SEQ ID NO: 3294 - RNA, 19 nt, synthetic construct
  source 1..19: mol_type = other RNA
gatgatacgtggccgcagg

SEQ ID NO: 3295 - RNA, 19 nt, synthetic construct
  source 1..19: mol_type = other RNA
cgatgatacgtggccgcag

SEQ ID NO: 3296 - RNA, 19 nt, synthetic construct
  source 1..19: mol_type = other RNA
ccgatgatacgtggccgca

SEQ ID NO: 3297 - RNA, 19 nt, synthetic construct
  source 1..19: mol_type = other RNA
gccgatgatacgtggccgc

SEQ ID NO: 3298 - RNA, 19 nt, synthetic construct
  source 1..19: mol_type = other RNA
cgccgatgatacgtggccg

SEQ ID NO: 3299 - RNA, 19 nt, synthetic construct
  source 1..19: mol_type = other RNA
ccgccgatgatacgtggcc

SEQ ID NO: 3300 - RNA, 19 nt, synthetic construct
  source 1..19: mol_type = other RNA
gccgccgatgatacgtggc

SEQ ID NO: 3301 - RNA, 19 nt, synthetic construct
  source 1..19: mol_type = other RNA
agccgccgatgatacgtgg

SEQ ID NO: 3302 - RNA, 19 nt, synthetic construct
  source 1..19: mol_type = other RNA
gagccgccgatgatacgtg

SEQ ID NO: 3303 - RNA, 19 nt, synthetic construct
  source 1..19: mol_type = other RNA
ggagccgccgatgatacgt

SEQ ID NO: 3304 - RNA, 19 nt, synthetic construct
  source 1..19: mol_type = other RNA
aggagccgccgatgatacg

SEQ ID NO: 3305 - RNA, 19 nt, synthetic construct
  source 1..19: mol_type = other RNA
gaggagccgccgatgatac

SEQ ID NO: 3306 - RNA, 19 nt, synthetic construct
  source 1..19: mol_type = other RNA
ggaggagccgccgatgata

SEQ ID NO: 3307 - RNA, 19 nt, synthetic construct
  source 1..19: mol_type = other RNA
aggaggagccgccgatgat

SEQ ID NO: 3308 - RNA, 19 nt, synthetic construct
  source 1..19: mol_type = other RNA
gaggaggagccgccgatga

SEQ ID NO: 3309 - RNA, 19 nt, synthetic construct
  source 1..19: mol_type = other RNA
cgaggaggagccgccgatg

SEQ ID NO: 3310 - RNA, 19 nt, synthetic construct
  source 1..19: mol_type = other RNA
gcgaggaggagccgccgat

SEQ ID NO: 3311 - RNA, 19 nt, synthetic construct
  source 1..19: mol_type = other RNA
agcgaggaggagccgccga

SEQ ID NO: 3312 - RNA, 19 nt, synthetic construct
  source 1..19: mol_type = other RNA
cagcgaggaggagccgccg

SEQ ID NO: 3313 - RNA, 19 nt, synthetic construct
  source 1..19: mol_type = other RNA
gcagcgaggaggagccgcc

SEQ ID NO: 3314 - RNA, 19 nt, synthetic construct
  source 1..19: mol_type = other RNA
ggcagcgaggaggagccgc

SEQ ID NO: 3315 - RNA, 19 nt, synthetic construct
  source 1..19: mol_type = other RNA
gggcagcgaggaggagccg

SEQ ID NO: 3316 - RNA, 19 nt, synthetic construct
  source 1..19: mol_type = other RNA
cgggcagcgaggaggagcc

SEQ ID NO: 3317 - RNA, 19 nt, synthetic construct
  source 1..19: mol_type = other RNA
ccgggcagcgaggaggagc

SEQ ID NO: 3318 - RNA, 19 nt, synthetic construct
  source 1..19: mol_type = other RNA
gccgggcagcgaggaggag

SEQ ID NO: 3319 - RNA, 19 nt, synthetic construct
  source 1..19: mol_type = other RNA
agccgggcagcgaggagga

SEQ ID NO: 3320 - RNA, 19 nt, synthetic construct
  source 1..19: mol_type = other RNA
gagccgggcagcgaggagg

SEQ ID NO: 3321 - RNA, 19 nt, synthetic construct
  source 1..19: mol_type = other RNA
cgagccgggcagcgaggag

SEQ ID NO: 3322 - RNA, 19 nt, synthetic construct
  source 1..19: mol_type = other RNA
gcgagccgggcagcgagga

SEQ ID NO: 3323 - RNA, 19 nt, synthetic construct
  source 1..19: mol_type = other RNA
tgcgagccgggcagcgagg

SEQ ID NO: 3324 - RNA, 19 nt, synthetic construct
  source 1..19: mol_type = other RNA
gtgcgagccgggcagcgag

SEQ ID NO: 3325 - RNA, 19 nt, synthetic construct
  source 1..19: mol_type = other RNA
ggtgcgagccgggcagcga

SEQ ID NO: 3326 - RNA, 19 nt, synthetic construct
  source 1..19: mol_type = other RNA
gggtgcgagccgggcagcg

SEQ ID NO: 3327 - RNA, 19 nt, synthetic construct
  source 1..19: mol_type = other RNA
ggggtgcgagccgggcagc

SEQ ID NO: 3328 - RNA, 19 nt, synthetic construct
  source 1..19: mol_type = other RNA
aggggtgcgagccgggcag

SEQ ID NO: 3329 - RNA, 19 nt, synthetic construct
  source 1..19: mol_type = other RNA
caggggtgcgagccgggca

SEQ ID NO: 3330 - RNA, 19 nt, synthetic construct
  source 1..19: mol_type = other RNA
ccaggggtgcgagccgggc

SEQ ID NO: 3331 - RNA, 19 nt, synthetic construct
  source 1..19: mol_type = other RNA
gccaggggtgcgagccggg

SEQ ID NO: 3332 - RNA, 19 nt, synthetic construct
  source 1..19: mol_type = other RNA
agccaggggtgcgagccgg

SEQ ID NO: 3333 - RNA, 19 nt, synthetic construct
  source 1..19: mol_type = other RNA
cagccaggggtgcgagccg

SEQ ID NO: 3334 - RNA, 19 nt, synthetic construct
  source 1..19: mol_type = other RNA
ccagccaggggtgcgagcc

SEQ ID NO: 3335 - RNA, 19 nt, synthetic construct
  source 1..19: mol_type = other RNA
gccagccaggggtgcgagc

SEQ ID NO: 3336 - RNA, 19 nt, synthetic construct
  source 1..19: mol_type = other RNA
ggccagccaggggtgcgag

SEQ ID NO: 3337 - RNA, 19 nt, synthetic construct
  source 1..19: mol_type = other RNA
cggccagccaggggtgcga

SEQ ID NO: 3338 - RNA, 19 nt, synthetic construct
  source 1..19: mol_type = other RNA
gcggccagccaggggtgcg

SEQ ID NO: 3339 - RNA, 19 nt, synthetic construct
  source 1..19: mol_type = other RNA
ggcggccagccaggggtgc

SEQ ID NO: 3340 - RNA, 19 nt, synthetic construct
  source 1..19: mol_type = other RNA
tggcggccagccaggggtg

SEQ ID NO: 3341 - RNA, 19 nt, synthetic construct
  source 1..19: mol_type = other RNA
atggcggccagccaggggt

SEQ ID NO: 3342 - RNA, 19 nt, synthetic construct
  source 1..19: mol_type = other RNA
gatggcggccagccagggg

SEQ ID NO: 3343 - RNA, 19 nt, synthetic construct
  source 1..19: mol_type = other RNA
agatggcggccagccaggg

SEQ ID NO: 3344 - RNA, 19 nt, synthetic construct
  source 1..19: mol_type = other RNA
tagatggcggccagccagg

SEQ ID NO: 3345 - RNA, 19 nt, synthetic construct
  source 1..19: mol_type = other RNA
gtagatggcggccagccag

SEQ ID NO: 3346 - RNA, 19 nt, synthetic construct
  source 1..19: mol_type = other RNA
tgtagatggcggccagcca

SEQ ID NO: 3347 - RNA, 19 nt, synthetic construct
  source 1..19: mol_type = other RNA
atgtagatggcggccagcc

SEQ ID NO: 3348 - RNA, 19 nt, synthetic construct
  source 1..19: mol_type = other RNA
gatgtagatggcggccagc

SEQ ID NO: 3349 - RNA, 19 nt, synthetic construct
  source 1..19: mol_type = other RNA
cgatgtagatggcggccag

SEQ ID NO: 3350 - RNA, 19 nt, synthetic construct
  source 1..19: mol_type = other RNA
ccgatgtagatggcggcca

SEQ ID NO: 3351 - RNA, 19 nt, synthetic construct
  source 1..19: mol_type = other RNA
cccgatgtagatggcggcc

SEQ ID NO: 3352 - RNA, 19 nt, synthetic construct
  source 1..19: mol_type = other RNA
ccccgatgtagatggcggc

SEQ ID NO: 3353 - RNA, 19 nt, synthetic construct
  source 1..19: mol_type = other RNA
tccccgatgtagatggcgg

SEQ ID NO: 3354 - RNA, 19 nt, synthetic construct
  source 1..19: mol_type = other RNA
gtccccgatgtagatggcg

SEQ ID NO: 3355 - RNA, 19 nt, synthetic construct
  source 1..19: mol_type = other RNA
tgtccccgatgtagatggc

SEQ ID NO: 3356 - RNA, 19 nt, synthetic construct
  source 1..19: mol_type = other RNA
ctgtccccgatgtagatgg

SEQ ID NO: 3357 - RNA, 19 nt, synthetic construct
  source 1..19: mol_type = other RNA
gctgtccccgatgtagatg

SEQ ID NO: 3358 - RNA, 19 nt, synthetic construct
  source 1..19: mol_type = other RNA
agctgtccccgatgtagat

SEQ ID NO: 3359 - RNA, 19 nt, synthetic construct
  source 1..19: mol_type = other RNA
aagctgtccccgatgtaga

SEQ ID NO: 3360 - RNA, 19 nt, synthetic construct
  source 1..19: mol_type = other RNA
gaagctgtccccgatgtag

SEQ ID NO: 3361 - RNA, 19 nt, synthetic construct
  source 1..19: mol_type = other RNA
agaagctgtccccgatgta

SEQ ID NO: 3362 - RNA, 19 nt, synthetic construct
  source 1..19: mol_type = other RNA
cagaagctgtccccgatgt

SEQ ID NO: 3363 - RNA, 19 nt, synthetic construct
  source 1..19: mol_type = other RNA
gcagaagctgtccccgatg

SEQ ID NO: 3364 - RNA, 19 nt, synthetic construct
  source 1..19: mol_type = other RNA
cgcagaagctgtccccgat

SEQ ID NO: 3365 - RNA, 19 nt, synthetic construct
  source 1..19: mol_type = other RNA
gcgcagaagctgtccccga

SEQ ID NO: 3366 - RNA, 19 nt, synthetic construct
  source 1..19: mol_type = other RNA
ggcgcagaagctgtccccg

SEQ ID NO: 3367 - RNA, 19 nt, synthetic construct
  source 1..19: mol_type = other RNA
cggcgcagaagctgtcccc

SEQ ID NO: 3368 - RNA, 19 nt, synthetic construct
  source 1..19: mol_type = other RNA
ccggcgcagaagctgtccc

SEQ ID NO: 3369 - RNA, 19 nt, synthetic construct
  source 1..19: mol_type = other RNA
cccggcgcagaagctgtcc

SEQ ID NO: 3370 - RNA, 19 nt, synthetic construct
  source 1..19: mol_type = other RNA
tcccggcgcagaagctgtc

SEQ ID NO: 3371 - RNA, 19 nt, synthetic construct
  source 1..19: mol_type = other RNA
ctcccggcgcagaagctgt

SEQ ID NO: 3372 - RNA, 19 nt, synthetic construct
  source 1..19: mol_type = other RNA
gctcccggcgcagaagctg

SEQ ID NO: 3373 - RNA, 19 nt, synthetic construct
  source 1..19: mol_type = other RNA
ggctcccggcgcagaagct

SEQ ID NO: 3374 - RNA, 19 nt, synthetic construct
  source 1..19: mol_type = other RNA
aggctcccggcgcagaagc

SEQ ID NO: 3375 - RNA, 19 nt, synthetic construct
  source 1..19: mol_type = other RNA
caggctcccggcgcagaag

SEQ ID NO: 3376 - RNA, 19 nt, synthetic construct
  source 1..19: mol_type = other RNA
ccaggctcccggcgcagaa

SEQ ID NO: 3377 - RNA, 19 nt, synthetic construct
  source 1..19: mol_type = other RNA
accaggctcccggcgcaga

SEQ ID NO: 3378 - RNA, 19 nt, synthetic construct
  source 1..19: mol_type = other RNA
gaccaggctcccggcgcag

SEQ ID NO: 3379 - RNA, 19 nt, synthetic construct
  source 1..19: mol_type = other RNA
ggaccaggctcccggcgca

SEQ ID NO: 3380 - RNA, 19 nt, synthetic construct
  source 1..19: mol_type = other RNA
tggaccaggctcccggcgc

SEQ ID NO: 3381 - RNA, 19 nt, synthetic construct
  source 1..19: mol_type = other RNA
gtggaccaggctcccggcg

SEQ ID NO: 3382 - RNA, 19 nt, synthetic construct
  source 1..19: mol_type = other RNA
tgtggaccaggctcccggc

SEQ ID NO: 3383 - RNA, 19 nt, synthetic construct
  source 1..19: mol_type = other RNA
gtgtggaccaggctcccgg

SEQ ID NO: 3384 - RNA, 19 nt, synthetic construct
  source 1..19: mol_type = other RNA
ggtgtggaccaggctcccg

SEQ ID NO: 3385 - RNA, 19 nt, synthetic construct
  source 1..19: mol_type = other RNA
aggtgtggaccaggctccc

SEQ ID NO: 3386 - RNA, 19 nt, synthetic construct
  source 1..19: mol_type = other RNA
caggtgtggaccaggctcc

SEQ ID NO: 3387 - RNA, 19 nt, synthetic construct
  source 1..19: mol_type = other RNA
gcaggtgtggaccaggctc

SEQ ID NO: 3388 - RNA, 19 nt, synthetic construct
  source 1..19: mol_type = other RNA
agcaggtgtggaccaggct

SEQ ID NO: 3389 - RNA, 19 nt, synthetic construct
  source 1..19: mol_type = other RNA
cagcaggtgtggaccaggc

SEQ ID NO: 3390 - RNA, 19 nt, synthetic construct
  source 1..19: mol_type = other RNA
ccagcaggtgtggaccagg

SEQ ID NO: 3391 - RNA, 19 nt, synthetic construct
  source 1..19: mol_type = other RNA
cccagcaggtgtggaccag

SEQ ID NO: 3392 - RNA, 19 nt, synthetic construct
  source 1..19: mol_type = other RNA
acccagcaggtgtggacca

SEQ ID NO: 3393 - RNA, 19 nt, synthetic construct
  source 1..19: mol_type = other RNA
cacccagcaggtgtggacc

SEQ ID NO: 3394 - RNA, 19 nt, synthetic construct
  source 1..19: mol_type = other RNA
ccacccagcaggtgtggac

SEQ ID NO: 3395 - RNA, 19 nt, synthetic construct
  source 1..19: mol_type = other RNA
accacccagcaggtgtgga

SEQ ID NO: 3396 - RNA, 19 nt, synthetic construct
  source 1..19: mol_type = other RNA
caccacccagcaggtgtgg

SEQ ID NO: 3397 - RNA, 19 nt, synthetic construct
  source 1..19: mol_type = other RNA
acaccacccagcaggtgtg

SEQ ID NO: 3398 - RNA, 19 nt, synthetic construct
  source 1..19: mol_type = other RNA
gacaccacccagcaggtgt

SEQ ID NO: 3399 - RNA, 19 nt, synthetic construct
  source 1..19: mol_type = other RNA
cgacaccacccagcaggtg

SEQ ID NO: 3400 - RNA, 19 nt, synthetic construct
  source 1..19: mol_type = other RNA
ccgacaccacccagcaggt

SEQ ID NO: 3401 - RNA, 19 nt, synthetic construct
  source 1..19: mol_type = other RNA
gccgacaccacccagcagg

SEQ ID NO: 3402 - RNA, 19 nt, synthetic construct
  source 1..19: mol_type = other RNA
ggccgacaccacccagcag

SEQ ID NO: 3403 - RNA, 19 nt, synthetic construct
  source 1..19: mol_type = other RNA
cggccgacaccacccagca

SEQ ID NO: 3404 - RNA, 19 nt, synthetic construct
  source 1..19: mol_type = other RNA
gcggccgacaccacccagc

SEQ ID NO: 3405 - RNA, 19 nt, synthetic construct
  source 1..19: mol_type = other RNA
ggcggccgacaccacccag

SEQ ID NO: 3406 - RNA, 19 nt, synthetic construct
  source 1..19: mol_type = other RNA
gggcggccgacaccaccca

SEQ ID NO: 3407 - RNA, 19 nt, synthetic construct
  source 1..19: mol_type = other RNA
tgggcggccgacaccaccc

SEQ ID NO: 3408 - RNA, 19 nt, synthetic construct
  source 1..19: mol_type = other RNA
gtgggcggccgacaccacc

SEQ ID NO: 3409 - RNA, 19 nt, synthetic construct
  source 1..19: mol_type = other RNA
agtgggcggccgacaccac

SEQ ID NO: 3410 - RNA, 19 nt, synthetic construct
  source 1..19: mol_type = other RNA
cagtgggcggccgacacca

SEQ ID NO: 3411 - RNA, 19 nt, synthetic construct
  source 1..19: mol_type = other RNA
gcagtgggcggccgacacc

SEQ ID NO: 3412 - RNA, 19 nt, synthetic construct
  source 1..19: mol_type = other RNA
agcagtgggcggccgacac

SEQ ID NO: 3413 - RNA, 19 nt, synthetic construct
  source 1..19: mol_type = other RNA
aagcagtgggcggccgaca

SEQ ID NO: 3414 - RNA, 19 nt, synthetic construct
  source 1..19: mol_type = other RNA
gaagcagtgggcggccgac

SEQ ID NO: 3415 - RNA, 19 nt, synthetic construct
  source 1..19: mol_type = other RNA
agaagcagtgggcggccga

SEQ ID NO: 3416 - RNA, 19 nt, synthetic construct
  source 1..19: mol_type = other RNA
gagaagcagtgggcggccg

SEQ ID NO: 3417 - RNA, 19 nt, synthetic construct
  source 1..19: mol_type = other RNA
ggagaagcagtgggcggcc

SEQ ID NO: 3418 - RNA, 19 nt, synthetic construct
  source 1..19: mol_type = other RNA
gggagaagcagtgggcggc

SEQ ID NO: 3419 - RNA, 19 nt, synthetic construct
  source 1..19: mol_type = other RNA
tgggagaagcagtgggcgg

SEQ ID NO: 3420 - RNA, 19 nt, synthetic construct
  source 1..19: mol_type = other RNA
gtgggagaagcagtgggcg

SEQ ID NO: 3421 - RNA, 19 nt, synthetic construct
  source 1..19: mol_type = other RNA
tgtgggagaagcagtgggc

SEQ ID NO: 3422 - RNA, 19 nt, synthetic construct
  source 1..19: mol_type = other RNA
ctgtgggagaagcagtggg

SEQ ID NO: 3423 - RNA, 19 nt, synthetic construct
  source 1..19: mol_type = other RNA
gctgtgggagaagcagtgg

SEQ ID NO: 3424 - RNA, 19 nt, synthetic construct
  source 1..19: mol_type = other RNA
ggctgtgggagaagcagtg

SEQ ID NO: 3425 - RNA, 19 nt, synthetic construct
  source 1..19: mol_type = other RNA
gggctgtgggagaagcagt

SEQ ID NO: 3426 - RNA, 19 nt, synthetic construct
  source 1..19: mol_type = other RNA
ggggctgtgggagaagcag

SEQ ID NO: 3427 - RNA, 19 nt, synthetic construct
  source 1..19: mol_type = other RNA
gggggctgtgggagaagca

SEQ ID NO: 3428 - RNA, 19 nt, synthetic construct
  source 1..19: mol_type = other RNA
ggggggctgtgggagaagc

SEQ ID NO: 3429 - RNA, 19 nt, synthetic construct
  source 1..19: mol_type = other RNA
gggggggctgtgggagaag

SEQ ID NO: 3430 - RNA, 19 nt, synthetic construct
  source 1..19: mol_type = other RNA
tgggggggctgtgggagaa

SEQ ID NO: 3431 - RNA, 19 nt, synthetic construct
  source 1..19: mol_type = other RNA
ctgggggggctgtgggaga

SEQ ID NO: 3432 - RNA, 19 nt, synthetic construct
  source 1..19: mol_type = other RNA
cctgggggggctgtgggag

SEQ ID NO: 3433 - RNA, 19 nt, synthetic construct
  source 1..19: mol_type = other RNA
ccctgggggggctgtggga

SEQ ID NO: 3434 - RNA, 19 nt, synthetic construct
  source 1..19: mol_type = other RNA
tccctgggggggctgtggg

SEQ ID NO: 3435 - RNA, 19 nt, synthetic construct
  source 1..19: mol_type = other RNA
gtccctgggggggctgtgg

SEQ ID NO: 3436 - RNA, 19 nt, synthetic construct
  source 1..19: mol_type = other RNA
tgtccctgggggggctgtg

SEQ ID NO: 3437 - RNA, 19 nt, synthetic construct
  source 1..19: mol_type = other RNA
ctgtccctgggggggctgt

SEQ ID NO: 3438 - RNA, 19 nt, synthetic construct
  source 1..19: mol_type = other RNA
gctgtccctgggggggctg

SEQ ID NO: 3439 - RNA, 19 nt, synthetic construct
  source 1..19: mol_type = other RNA
cgctgtccctgggggggct

SEQ ID NO: 3440 - RNA, 19 nt, synthetic construct
  source 1..19: mol_type = other RNA
acgctgtccctgggggggc

SEQ ID NO: 3441 - RNA, 19 nt, synthetic construct
  source 1..19: mol_type = other RNA
gacgctgtccctggggggg

SEQ ID NO: 3442 - RNA, 19 nt, synthetic construct
  source 1..19: mol_type = other RNA
agacgctgtccctgggggg

SEQ ID NO: 3443 - RNA, 19 nt, synthetic construct
  source 1..19: mol_type = other RNA
gagacgctgtccctggggg

SEQ ID NO: 3444 - RNA, 19 nt, synthetic construct
  source 1..19: mol_type = other RNA
ggagacgctgtccctgggg

SEQ ID NO: 3445 - RNA, 19 nt, synthetic construct
  source 1..19: mol_type = other RNA
cggagacgctgtccctggg

SEQ ID NO: 3446 - RNA, 19 nt, synthetic construct
  source 1..19: mol_type = other RNA
acggagacgctgtccctgg

SEQ ID NO: 3447 - RNA, 19 nt, synthetic construct
  source 1..19: mol_type = other RNA
cacggagacgctgtccctg

SEQ ID NO: 3448 - RNA, 19 nt, synthetic construct
  source 1..19: mol_type = other RNA
ccacggagacgctgtccct

SEQ ID NO: 3449 - RNA, 19 nt, synthetic construct
  source 1..19: mol_type = other RNA
accacggagacgctgtccc

SEQ ID NO: 3450 - RNA, 19 nt, synthetic construct
  source 1..19: mol_type = other RNA
caccacggagacgctgtcc

SEQ ID NO: 3451 - RNA, 19 nt, synthetic construct
  source 1..19: mol_type = other RNA
gcaccacggagacgctgtc

SEQ ID NO: 3452 - RNA, 19 nt, synthetic construct
  source 1..19: mol_type = other RNA
agcaccacggagacgctgt

SEQ ID NO: 3453 - RNA, 19 nt, synthetic construct
  source 1..19: mol_type = other RNA
cagcaccacggagacgctg

SEQ ID NO: 3454 - RNA, 19 nt, synthetic construct
  source 1..19: mol_type = other RNA
ccagcaccacggagacgct

SEQ ID NO: 3455 - RNA, 19 nt, synthetic construct
  source 1..19: mol_type = other RNA
cccagcaccacggagacgc

SEQ ID NO: 3456 - RNA, 19 nt, synthetic construct
  source 1..19: mol_type = other RNA
gcccagcaccacggagacg

SEQ ID NO: 3457 - RNA, 19 nt, synthetic construct
  source 1..19: mol_type = other RNA
ggcccagcaccacggagac

SEQ ID NO: 3458 - RNA, 19 nt, synthetic construct
  source 1..19: mol_type = other RNA
tggcccagcaccacggaga

SEQ ID NO: 3459 - RNA, 19 nt, synthetic construct
  source 1..19: mol_type = other RNA
ctggcccagcaccacggag

SEQ ID NO: 3460 - RNA, 19 nt, synthetic construct
  source 1..19: mol_type = other RNA
gctggcccagcaccacgga

SEQ ID NO: 3461 - RNA, 19 nt, synthetic construct
  source 1..19: mol_type = other RNA
tgctggcccagcaccacgg

SEQ ID NO: 3462 - RNA, 19 nt, synthetic construct
  source 1..19: mol_type = other RNA
gtgctggcccagcaccacg

SEQ ID NO: 3463 - RNA, 19 nt, synthetic construct
  source 1..19: mol_type = other RNA
agtgctggcccagcaccac

SEQ ID NO: 3464 - RNA, 19 nt, synthetic construct
  source 1..19: mol_type = other RNA
aagtgctggcccagcacca

SEQ ID NO: 3465 - RNA, 19 nt, synthetic construct
  source 1..19: mol_type = other RNA
gaagtgctggcccagcacc

SEQ ID NO: 3466 - RNA, 19 nt, synthetic construct
  source 1..19: mol_type = other RNA
agaagtgctggcccagcac

SEQ ID NO: 3467 - RNA, 19 nt, synthetic construct
  source 1..19: mol_type = other RNA
aagaagtgctggcccagca

SEQ ID NO: 3468 - RNA, 19 nt, synthetic construct
  source 1..19: mol_type = other RNA
gaagaagtgctggcccagc

SEQ ID NO: 3469 - RNA, 19 nt, synthetic construct
  source 1..19: mol_type = other RNA
tgaagaagtgctggcccag

SEQ ID NO: 3470 - RNA, 19 nt, synthetic construct
  source 1..19: mol_type = other RNA
ttgaagaagtgctggccca

SEQ ID NO: 3471 - RNA, 19 nt, synthetic construct
  source 1..19: mol_type = other RNA
gttgaagaagtgctggccc

SEQ ID NO: 3472 - RNA, 19 nt, synthetic construct
  source 1..19: mol_type = other RNA
ggttgaagaagtgctggcc

SEQ ID NO: 3473 - RNA, 19 nt, synthetic construct
  source 1..19: mol_type = other RNA
cggttgaagaagtgctggc

SEQ ID NO: 3474 - RNA, 19 nt, synthetic construct
  source 1..19: mol_type = other RNA
gcggttgaagaagtgctgg

SEQ ID NO: 3475 - RNA, 19 nt, synthetic construct
  source 1..19: mol_type = other RNA
tgcggttgaagaagtgctg

SEQ ID NO: 3476 - RNA, 19 nt, synthetic construct
  source 1..19: mol_type = other RNA
gtgcggttgaagaagtgct

SEQ ID NO: 3477 - RNA, 19 nt, synthetic construct
  source 1..19: mol_type = other RNA
cgtgcggttgaagaagtgc

SEQ ID NO: 3478 - RNA, 19 nt, synthetic construct
  source 1..19: mol_type = other RNA
tcgtgcggttgaagaagtg

SEQ ID NO: 3479 - RNA, 19 nt, synthetic construct
  source 1..19: mol_type = other RNA
gtcgtgcggttgaagaagt

SEQ ID NO: 3480 - RNA, 19 nt, synthetic construct
  source 1..19: mol_type = other RNA
cgtcgtgcggttgaagaag

SEQ ID NO: 3481 - RNA, 19 nt, synthetic construct
  source 1..19: mol_type = other RNA
ccgtcgtgcggttgaagaa

SEQ ID NO: 3482 - RNA, 19 nt, synthetic construct
  source 1..19: mol_type = other RNA
tccgtcgtgcggttgaaga

SEQ ID NO: 3483 - RNA, 19 nt, synthetic construct
  source 1..19: mol_type = other RNA
gtccgtcgtgcggttgaag

SEQ ID NO: 3484 - RNA, 19 nt, synthetic construct
  source 1..19: mol_type = other RNA
cgtccgtcgtgcggttgaa

SEQ ID NO: 3485 - RNA, 19 nt, synthetic construct
  source 1..19: mol_type = other RNA
acgtccgtcgtgcggttga

SEQ ID NO: 3486 - RNA, 19 nt, synthetic construct
  source 1..19: mol_type = other RNA
cacgtccgtcgtgcggttg

SEQ ID NO: 3487 - RNA, 19 nt, synthetic construct
  source 1..19: mol_type = other RNA
tcacgtccgtcgtgcggtt

SEQ ID NO: 3488 - RNA, 19 nt, synthetic construct
  source 1..19: mol_type = other RNA
gtcacgtccgtcgtgcggt

SEQ ID NO: 3489 - RNA, 19 nt, synthetic construct
  source 1..19: mol_type = other RNA
cgtcacgtccgtcgtgcgg

SEQ ID NO: 3490 - RNA, 19 nt, synthetic construct
  source 1..19: mol_type = other RNA
gcgtcacgtccgtcgtgcg

SEQ ID NO: 3491 - RNA, 19 nt, synthetic construct
  source 1..19: mol_type = other RNA
tgcgtcacgtccgtcgtgc

SEQ ID NO: 3492 - RNA, 19 nt, synthetic construct
  source 1..19: mol_type = other RNA
ctgcgtcacgtccgtcgtg

SEQ ID NO: 3493 - RNA, 19 nt, synthetic construct
  source 1..19: mol_type = other RNA
tctgcgtcacgtccgtcgt

SEQ ID NO: 3494 - RNA, 19 nt, synthetic construct
  source 1..19: mol_type = other RNA
gtctgcgtcacgtccgtcg

SEQ ID NO: 3495 - RNA, 19 nt, synthetic construct
  source 1..19: mol_type = other RNA
ggtctgcgtcacgtccgtc

SEQ ID NO: 3496 - RNA, 19 nt, synthetic construct
  source 1..19: mol_type = other RNA
aggtctgcgtcacgtccgt

SEQ ID NO: 3497 - RNA, 19 nt, synthetic construct
  source 1..19: mol_type = other RNA
aaggtctgcgtcacgtccg

SEQ ID NO: 3498 - RNA, 19 nt, synthetic construct
  source 1..19: mol_type = other RNA
gaaggtctgcgtcacgtcc

SEQ ID NO: 3499 - RNA, 19 nt, synthetic construct
  source 1..19: mol_type = other RNA
cgaaggtctgcgtcacgtc

SEQ ID NO: 3500 - RNA, 19 nt, synthetic construct
  source 1..19: mol_type = other RNA
ccgaaggtctgcgtcacgt

SEQ ID NO: 3501 - RNA, 19 nt, synthetic construct
  source 1..19: mol_type = other RNA
gccgaaggtctgcgtcacg

SEQ ID NO: 3502 - RNA, 19 nt, synthetic construct
  source 1..19: mol_type = other RNA
tgccgaaggtctgcgtcac

SEQ ID NO: 3503 - RNA, 19 nt, synthetic construct
  source 1..19: mol_type = other RNA
atgccgaaggtctgcgtca

SEQ ID NO: 3504 - RNA, 19 nt, synthetic construct
  source 1..19: mol_type = other RNA
gatgccgaaggtctgcgtc

SEQ ID NO: 3505 - RNA, 19 nt, synthetic construct
  source 1..19: mol_type = other RNA
cgatgccgaaggtctgcgt

SEQ ID NO: 3506 - RNA, 19 nt, synthetic construct
  source 1..19: mol_type = other RNA
tcgatgccgaaggtctgcg

SEQ ID NO: 3507 - RNA, 19 nt, synthetic construct
  source 1..19: mol_type = other RNA
ctcgatgccgaaggtctgc

SEQ ID NO: 3508 - RNA, 19 nt, synthetic construct
  source 1..19: mol_type = other RNA
tctcgatgccgaaggtctg

SEQ ID NO: 3509 - RNA, 19 nt, synthetic construct
  source 1..19: mol_type = other RNA
ttctcgatgccgaaggtct

SEQ ID NO: 3510 - RNA, 19 nt, synthetic construct
  source 1..19: mol_type = other RNA
cttctcgatgccgaaggtc

SEQ ID NO: 3511 - RNA, 19 nt, synthetic construct
  source 1..19: mol_type = other RNA
acttctcgatgccgaaggt

SEQ ID NO: 3512 - RNA, 19 nt, synthetic construct
  source 1..19: mol_type = other RNA
tacttctcgatgccgaagg

SEQ ID NO: 3513 - RNA, 19 nt, synthetic construct
  source 1..19: mol_type = other RNA
gtacttctcgatgccgaag

SEQ ID NO: 3514 - RNA, 19 nt, synthetic construct
  source 1..19: mol_type = other RNA
tgtacttctcgatgccgaa

SEQ ID NO: 3515 - RNA, 19 nt, synthetic construct
  source 1..19: mol_type = other RNA
atgtacttctcgatgccga

SEQ ID NO: 3516 - RNA, 19 nt, synthetic construct
  source 1..19: mol_type = other RNA
gatgtacttctcgatgccg

SEQ ID NO: 3517 - RNA, 19 nt, synthetic construct
  source 1..19: mol_type = other RNA
ggatgtacttctcgatgcc

SEQ ID NO: 3518 - RNA, 19 nt, synthetic construct
  source 1..19: mol_type = other RNA
gggatgtacttctcgatgc

SEQ ID NO: 3519 - RNA, 19 nt, synthetic construct
  source 1..19: mol_type = other RNA
cgggatgtacttctcgatg

SEQ ID NO: 3520 - RNA, 19 nt, synthetic construct
  source 1..19: mol_type = other RNA
acgggatgtacttctcgat

SEQ ID NO: 3521 - RNA, 19 nt, synthetic construct
  source 1..19: mol_type = other RNA
tacgggatgtacttctcga

SEQ ID NO: 3522 - RNA, 19 nt, synthetic construct
  source 1..19: mol_type = other RNA
gtacgggatgtacttctcg

SEQ ID NO: 3523 - RNA, 19 nt, synthetic construct
  source 1..19: mol_type = other RNA
tgtacgggatgtacttctc

SEQ ID NO: 3524 - RNA, 19 nt, synthetic construct
  source 1..19: mol_type = other RNA
gtgtacgggatgtacttct

SEQ ID NO: 3525 - RNA, 19 nt, synthetic construct
  source 1..19: mol_type = other RNA
ggtgtacgggatgtacttc

SEQ ID NO: 3526 - RNA, 19 nt, synthetic construct
  source 1..19: mol_type = other RNA
gggtgtacgggatgtactt

SEQ ID NO: 3527 - RNA, 19 nt, synthetic construct
  source 1..19: mol_type = other RNA
agggtgtacgggatgtact

SEQ ID NO: 3528 - RNA, 19 nt, synthetic construct
  source 1..19: mol_type = other RNA
cagggtgtacgggatgtac

SEQ ID NO: 3529 - RNA, 19 nt, synthetic construct
  source 1..19: mol_type = other RNA
acagggtgtacgggatgta

SEQ ID NO: 3530 - RNA, 19 nt, synthetic construct
  source 1..19: mol_type = other RNA
tacagggtgtacgggatgt

SEQ ID NO: 3531 - RNA, 19 nt, synthetic construct
  source 1..19: mol_type = other RNA
gtacagggtgtacgggatg

SEQ ID NO: 3532 - RNA, 19 nt, synthetic construct
  source 1..19: mol_type = other RNA
agtacagggtgtacgggat

SEQ ID NO: 3533 - RNA, 19 nt, synthetic construct
  source 1..19: mol_type = other RNA
gagtacagggtgtacggga

SEQ ID NO: 3534 - RNA, 19 nt, synthetic construct
  source 1..19: mol_type = other RNA
cgagtacagggtgtacggg

SEQ ID NO: 3535 - RNA, 19 nt, synthetic construct
  source 1..19: mol_type = other RNA
ccgagtacagggtgtacgg

SEQ ID NO: 3536 - RNA, 19 nt, synthetic construct
  source 1..19: mol_type = other RNA
accgagtacagggtgtacg

SEQ ID NO: 3537 - RNA, 19 nt, synthetic construct
  source 1..19: mol_type = other RNA
caccgagtacagggtgtac

SEQ ID NO: 3538 - RNA, 19 nt, synthetic construct
  source 1..19: mol_type = other RNA
acaccgagtacagggtgta

SEQ ID NO: 3539 - RNA, 19 nt, synthetic construct
  source 1..19: mol_type = other RNA
aacaccgagtacagggtgt

SEQ ID NO: 3540 - RNA, 19 nt, synthetic construct
  source 1..19: mol_type = other RNA
gaacaccgagtacagggtg

SEQ ID NO: 3541 - RNA, 19 nt, synthetic construct
  source 1..19: mol_type = other RNA
tgaacaccgagtacagggt

SEQ ID NO: 3542 - RNA, 19 nt, synthetic construct
  source 1..19: mol_type = other RNA
ttgaacaccgagtacaggg

SEQ ID NO: 3543 - RNA, 19 nt, synthetic construct
  source 1..19: mol_type = other RNA
gttgaacaccgagtacagg

SEQ ID NO: 3544 - RNA, 19 nt, synthetic construct
  source 1..19: mol_type = other RNA
ggttgaacaccgagtacag

SEQ ID NO: 3545 - RNA, 19 nt, synthetic construct
  source 1..19: mol_type = other RNA
gggttgaacaccgagtaca

SEQ ID NO: 3546 - RNA, 19 nt, synthetic construct
  source 1..19: mol_type = other RNA
ggggttgaacaccgagtac

SEQ ID NO: 3547 - RNA, 19 nt, synthetic construct
  source 1..19: mol_type = other RNA
tggggttgaacaccgagta

SEQ ID NO: 3548 - RNA, 19 nt, synthetic construct
  source 1..19: mol_type = other RNA
ctggggttgaacaccgagt

SEQ ID NO: 3549 - RNA, 19 nt, synthetic construct
  source 1..19: mol_type = other RNA
gctggggttgaacaccgag

SEQ ID NO: 3550 - RNA, 19 nt, synthetic construct
  source 1..19: mol_type = other RNA
cgctggggttgaacaccga

SEQ ID NO: 3551 - RNA, 19 nt, synthetic construct
  source 1..19: mol_type = other RNA
tcgctggggttgaacaccg

SEQ ID NO: 3552 - RNA, 19 nt, synthetic construct
  source 1..19: mol_type = other RNA
gtcgctggggttgaacacc

SEQ ID NO: 3553 - RNA, 19 nt, synthetic construct
  source 1..19: mol_type = other RNA
ggtcgctggggttgaacac

SEQ ID NO: 3554 - RNA, 19 nt, synthetic construct
  source 1..19: mol_type = other RNA
tggtcgctggggttgaaca

SEQ ID NO: 3555 - RNA, 19 nt, synthetic construct
  source 1..19: mol_type = other RNA
gtggtcgctggggttgaac

SEQ ID NO: 3556 - RNA, 19 nt, synthetic construct
  source 1..19: mol_type = other RNA
cgtggtcgctggggttgaa

SEQ ID NO: 3557 - RNA, 19 nt, synthetic construct
  source 1..19: mol_type = other RNA
tcgtggtcgctggggttga

SEQ ID NO: 3558 - RNA, 19 nt, synthetic construct
  source 1..19: mol_type = other RNA
gtcgtggtcgctggggttg

SEQ ID NO: 3559 - RNA, 19 nt, synthetic construct
  source 1..19: mol_type = other RNA
ggtcgtggtcgctggggtt

SEQ ID NO: 3560 - RNA, 19 nt, synthetic construct
  source 1..19: mol_type = other RNA
aggtcgtggtcgctggggt

SEQ ID NO: 3561 - RNA, 19 nt, synthetic construct
  source 1..19: mol_type = other RNA
gaggtcgtggtcgctgggg

SEQ ID NO: 3562 - RNA, 19 nt, synthetic construct
  source 1..19: mol_type = other RNA
cgaggtcgtggtcgctggg

SEQ ID NO: 3563 - RNA, 19 nt, synthetic construct
  source 1..19: mol_type = other RNA
acgaggtcgtggtcgctgg

SEQ ID NO: 3564 - RNA, 19 nt, synthetic construct
  source 1..19: mol_type = other RNA
gacgaggtcgtggtcgctg

SEQ ID NO: 3565 - RNA, 19 nt, synthetic construct
  source 1..19: mol_type = other RNA
ggacgaggtcgtggtcgct

SEQ ID NO: 3566 - RNA, 19 nt, synthetic construct
  source 1..19: mol_type = other RNA
aggacgaggtcgtggtcgc

SEQ ID NO: 3567 - RNA, 19 nt, synthetic construct
  source 1..19: mol_type = other RNA
caggacgaggtcgtggtcg

SEQ ID NO: 3568 - RNA, 19 nt, synthetic construct
  source 1..19: mol_type = other RNA
tcaggacgaggtcgtggtc

SEQ ID NO: 3569 - RNA, 19 nt, synthetic construct
  source 1..19: mol_type = other RNA
atcaggacgaggtcgtggt

SEQ ID NO: 3570 - RNA, 19 nt, synthetic construct
  source 1..19: mol_type = other RNA
gatcaggacgaggtcgtgg

SEQ ID NO: 3571 - RNA, 19 nt, synthetic construct
  source 1..19: mol_type = other RNA
ggatcaggacgaggtcgtg

SEQ ID NO: 3572 - RNA, 19 nt, synthetic construct
  source 1..19: mol_type = other RNA
cggatcaggacgaggtcgt

SEQ ID NO: 3573 - RNA, 19 nt, synthetic construct
  source 1..19: mol_type = other RNA
ccggatcaggacgaggtcg

SEQ ID NO: 3574 - RNA, 19 nt, synthetic construct
  source 1..19: mol_type = other RNA
gccggatcaggacgaggtc

SEQ ID NO: 3575 - RNA, 19 nt, synthetic construct
  source 1..19: mol_type = other RNA
agccggatcaggacgaggt

SEQ ID NO: 3576 - RNA, 19 nt, synthetic construct
  source 1..19: mol_type = other RNA
cagccggatcaggacgagg

SEQ ID NO: 3577 - RNA, 19 nt, synthetic construct
  source 1..19: mol_type = other RNA
tcagccggatcaggacgag

SEQ ID NO: 3578 - RNA, 19 nt, synthetic construct
  source 1..19: mol_type = other RNA
ttcagccggatcaggacga

SEQ ID NO: 3579 - RNA, 19 nt, synthetic construct
  source 1..19: mol_type = other RNA
cttcagccggatcaggacg

SEQ ID NO: 3580 - RNA, 19 nt, synthetic construct
  source 1..19: mol_type = other RNA
tcttcagccggatcaggac

SEQ ID NO: 3581 - RNA, 19 nt, synthetic construct
  source 1..19: mol_type = other RNA
ttcttcagccggatcagga

SEQ ID NO: 3582 - RNA, 19 nt, synthetic construct
  source 1..19: mol_type = other RNA
cttcttcagccggatcagg

SEQ ID NO: 3583 - RNA, 19 nt, synthetic construct
  source 1..19: mol_type = other RNA
tcttcttcagccggatcag

SEQ ID NO: 3584 - RNA, 19 nt, synthetic construct
  source 1..19: mol_type = other RNA
ttcttcttcagccggatca

SEQ ID NO: 3585 - RNA, 19 nt, synthetic construct
  source 1..19: mol_type = other RNA
tttcttcttcagccggatc

SEQ ID NO: 3586 - RNA, 19 nt, synthetic construct
  source 1..19: mol_type = other RNA
ctttcttcttcagccggat

SEQ ID NO: 3587 - RNA, 19 nt, synthetic construct
  source 1..19: mol_type = other RNA
cctttcttcttcagccgga

SEQ ID NO: 3588 - RNA, 19 nt, synthetic construct
  source 1..19: mol_type = other RNA
ccctttcttcttcagccgg

SEQ ID NO: 3589 - RNA, 19 nt, synthetic construct
  source 1..19: mol_type = other RNA
cccctttcttcttcagccg

SEQ ID NO: 3590 - RNA, 19 nt, synthetic construct
  source 1..19: mol_type = other RNA
tcccctttcttcttcagcc

SEQ ID NO: 3591 - RNA, 19 nt, synthetic construct
  source 1..19: mol_type = other RNA
gtcccctttcttcttcagc

SEQ ID NO: 3592 - RNA, 19 nt, synthetic construct
  source 1..19: mol_type = other RNA
ggtcccctttcttcttcag

SEQ ID NO: 3593 - RNA, 19 nt, synthetic construct
  source 1..19: mol_type = other RNA
cggtcccctttcttcttca

SEQ ID NO: 3594 - RNA, 19 nt, synthetic construct
  source 1..19: mol_type = other RNA
gcggtcccctttcttcttc

SEQ ID NO: 3595 - RNA, 19 nt, synthetic construct
  source 1..19: mol_type = other RNA
agcggtcccctttcttctt

SEQ ID NO: 3596 - RNA, 19 nt, synthetic construct
  source 1..19: mol_type = other RNA
cagcggtcccctttcttct

SEQ ID NO: 3597 - RNA, 19 nt, synthetic construct
  source 1..19: mol_type = other RNA
acagcggtcccctttcttc

SEQ ID NO: 3598 - RNA, 19 nt, synthetic construct
  source 1..19: mol_type = other RNA
cacagcggtcccctttctt

SEQ ID NO: 3599 - RNA, 19 nt, synthetic construct
  source 1..19: mol_type = other RNA
gcacagcggtcccctttct

SEQ ID NO: 3600 - RNA, 19 nt, synthetic construct
  source 1..19: mol_type = other RNA
ggcacagcggtcccctttc

SEQ ID NO: 3601 - RNA, 19 nt, synthetic construct
  source 1..19: mol_type = other RNA
tggcacagcggtccccttt

SEQ ID NO: 3602 - RNA, 19 nt, synthetic construct
  source 1..19: mol_type = other RNA
gtggcacagcggtcccctt

SEQ ID NO: 3603 - RNA, 19 nt, synthetic construct
  source 1..19: mol_type = other RNA
tgtggcacagcggtcccct

SEQ ID NO: 3604 - RNA, 19 nt, synthetic construct
  source 1..19: mol_type = other RNA
gtgtggcacagcggtcccc

SEQ ID NO: 3605 - RNA, 19 nt, synthetic construct
  source 1..19: mol_type = other RNA
cgtgtggcacagcggtccc

SEQ ID NO: 3606 - RNA, 19 nt, synthetic construct
  source 1..19: mol_type = other RNA
gcgtgtggcacagcggtcc

SEQ ID NO: 3607 - RNA, 19 nt, synthetic construct
  source 1..19: mol_type = other RNA
agcgtgtggcacagcggtc

SEQ ID NO: 3608 - RNA, 19 nt, synthetic construct
  source 1..19: mol_type = other RNA
gagcgtgtggcacagcggt

SEQ ID NO: 3609 - RNA, 19 nt, synthetic construct
  source 1..19: mol_type = other RNA
cgagcgtgtggcacagcgg

SEQ ID NO: 3610 - RNA, 19 nt, synthetic construct
  source 1..19: mol_type = other RNA
gcgagcgtgtggcacagcg

SEQ ID NO: 3611 - RNA, 19 nt, synthetic construct
  source 1..19: mol_type = other RNA
tgcgagcgtgtggcacagc

SEQ ID NO: 3612 - RNA, 19 nt, synthetic construct
  source 1..19: mol_type = other RNA
ctgcgagcgtgtggcacag

SEQ ID NO: 3613 - RNA, 19 nt, synthetic construct
  source 1..19: mol_type = other RNA
actgcgagcgtgtggcaca

SEQ ID NO: 3614 - RNA, 19 nt, synthetic construct
  source 1..19: mol_type = other RNA
aactgcgagcgtgtggcac

SEQ ID NO: 3615 - RNA, 19 nt, synthetic construct
  source 1..19: mol_type = other RNA
gaactgcgagcgtgtggca

SEQ ID NO: 3616 - RNA, 19 nt, synthetic construct
  source 1..19: mol_type = other RNA
cgaactgcgagcgtgtggc

SEQ ID NO: 3617 - RNA, 19 nt, synthetic construct
  source 1..19: mol_type = other RNA
acgaactgcgagcgtgtgg

SEQ ID NO: 3618 - RNA, 19 nt, synthetic construct
  source 1..19: mol_type = other RNA
cacgaactgcgagcgtgtg

SEQ ID NO: 3619 - RNA, 19 nt, synthetic construct
  source 1..19: mol_type = other RNA
gcacgaactgcgagcgtgt

SEQ ID NO: 3620 - RNA, 19 nt, synthetic construct
  source 1..19: mol_type = other RNA
tgcacgaactgcgagcgtg

SEQ ID NO: 3621 - RNA, 19 nt, synthetic construct
  source 1..19: mol_type = other RNA
ctgcacgaactgcgagcgt

SEQ ID NO: 3622 - RNA, 19 nt, synthetic construct
  source 1..19: mol_type = other RNA
gctgcacgaactgcgagcg

SEQ ID NO: 3623 - RNA, 19 nt, synthetic construct
  source 1..19: mol_type = other RNA
ggctgcacgaactgcgagc

SEQ ID NO: 3624 - RNA, 19 nt, synthetic construct
  source 1..19: mol_type = other RNA
gggctgcacgaactgcgag

SEQ ID NO: 3625 - RNA, 19 nt, synthetic construct
  source 1..19: mol_type = other RNA
tgggctgcacgaactgcga

SEQ ID NO: 3626 - RNA, 19 nt, synthetic construct
  source 1..19: mol_type = other RNA
atgggctgcacgaactgcg

SEQ ID NO: 3627 - RNA, 19 nt, synthetic construct
  source 1..19: mol_type = other RNA
gatgggctgcacgaactgc

SEQ ID NO: 3628 - RNA, 19 nt, synthetic construct
  source 1..19: mol_type = other RNA
agatgggctgcacgaactg

SEQ ID NO: 3629 - RNA, 19 nt, synthetic construct
  source 1..19: mol_type = other RNA
cagatgggctgcacgaact

SEQ ID NO: 3630 - RNA, 19 nt, synthetic construct
  source 1..19: mol_type = other RNA
gcagatgggctgcacgaac

SEQ ID NO: 3631 - RNA, 19 nt, synthetic construct
  source 1..19: mol_type = other RNA
ggcagatgggctgcacgaa

SEQ ID NO: 3632 - RNA, 19 nt, synthetic construct
  source 1..19: mol_type = other RNA
aggcagatgggctgcacga

SEQ ID NO: 3633 - RNA, 19 nt, synthetic construct
  source 1..19: mol_type = other RNA
caggcagatgggctgcacg

SEQ ID NO: 3634 - RNA, 19 nt, synthetic construct
  source 1..19: mol_type = other RNA
gcaggcagatgggctgcac

SEQ ID NO: 3635 - RNA, 19 nt, synthetic construct
  source 1..19: mol_type = other RNA
ggcaggcagatgggctgca

SEQ ID NO: 3636 - RNA, 19 nt, synthetic construct
  source 1..19: mol_type = other RNA
gggcaggcagatgggctgc

SEQ ID NO: 3637 - RNA, 19 nt, synthetic construct
  source 1..19: mol_type = other RNA
cgggcaggcagatgggctg

SEQ ID NO: 3638 - RNA, 19 nt, synthetic construct
  source 1..19: mol_type = other RNA
tcgggcaggcagatgggct

SEQ ID NO: 3639 - RNA, 19 nt, synthetic construct
  source 1..19: mol_type = other RNA
ctcgggcaggcagatgggc

SEQ ID NO: 3640 - RNA, 19 nt, synthetic construct
  source 1..19: mol_type = other RNA
gctcgggcaggcagatggg

SEQ ID NO: 3641 - RNA, 19 nt, synthetic construct
  source 1..19: mol_type = other RNA
ggctcgggcaggcagatgg

SEQ ID NO: 3642 - RNA, 19 nt, synthetic construct
  source 1..19: mol_type = other RNA
gggctcgggcaggcagatg

SEQ ID NO: 3643 - RNA, 19 nt, synthetic construct
  source 1..19: mol_type = other RNA
cgggctcgggcaggcagat

SEQ ID NO: 3644 - RNA, 19 nt, synthetic construct
  source 1..19: mol_type = other RNA
ccgggctcgggcaggcaga

SEQ ID NO: 3645 - RNA, 19 nt, synthetic construct
  source 1..19: mol_type = other RNA
gccgggctcgggcaggcag

SEQ ID NO: 3646 - RNA, 19 nt, synthetic construct
  source 1..19: mol_type = other RNA
tgccgggctcgggcaggca

SEQ ID NO: 3647 - RNA, 19 nt, synthetic construct
  source 1..19: mol_type = other RNA
ctgccgggctcgggcaggc

SEQ ID NO: 3648 - RNA, 19 nt, synthetic construct
  source 1..19: mol_type = other RNA
gctgccgggctcgggcagg

SEQ ID NO: 3649 - RNA, 19 nt, synthetic construct
  source 1..19: mol_type = other RNA
tgctgccgggctcgggcag

SEQ ID NO: 3650 - RNA, 19 nt, synthetic construct
  source 1..19: mol_type = other RNA
gtgctgccgggctcgggca

SEQ ID NO: 3651 - RNA, 19 nt, synthetic construct
  source 1..19: mol_type = other RNA
ggtgctgccgggctcgggc

SEQ ID NO: 3652 - RNA, 19 nt, synthetic construct
  source 1..19: mol_type = other RNA
aggtgctgccgggctcggg

SEQ ID NO: 3653 - RNA, 19 nt, synthetic construct
  source 1..19: mol_type = other RNA
aaggtgctgccgggctcgg

SEQ ID NO: 3654 - RNA, 19 nt, synthetic construct
  source 1..19: mol_type = other RNA
gaaggtgctgccgggctcg

SEQ ID NO: 3655 - RNA, 19 nt, synthetic construct
  source 1..19: mol_type = other RNA
ggaaggtgctgccgggctc

SEQ ID NO: 3656 - RNA, 19 nt, synthetic construct
  source 1..19: mol_type = other RNA
gggaaggtgctgccgggct

SEQ ID NO: 3657 - RNA, 19 nt, synthetic construct
  source 1..19: mol_type = other RNA
ggggaaggtgctgccgggc

SEQ ID NO: 3658 - RNA, 19 nt, synthetic construct
  source 1..19: mol_type = other RNA
cggggaaggtgctgccggg

SEQ ID NO: 3659 - RNA, 19 nt, synthetic construct
  source 1..19: mol_type = other RNA
gcggggaaggtgctgccgg

SEQ ID NO: 3660 - RNA, 19 nt, synthetic construct
  source 1..19: mol_type = other RNA
tgcggggaaggtgctgccg

SEQ ID NO: 3661 - RNA, 19 nt, synthetic construct
  source 1..19: mol_type = other RNA
ctgcggggaaggtgctgcc

SEQ ID NO: 3662 - RNA, 19 nt, synthetic construct
  source 1..19: mol_type = other RNA
cctgcggggaaggtgctgc

SEQ ID NO: 3663 - RNA, 19 nt, synthetic construct
  source 1..19: mol_type = other RNA
tcctgcggggaaggtgctg

SEQ ID NO: 3664 - RNA, 19 nt, synthetic construct
  source 1..19: mol_type = other RNA
gtcctgcggggaaggtgct

SEQ ID NO: 3665 - RNA, 19 nt, synthetic construct
  source 1..19: mol_type = other RNA
tgtcctgcggggaaggtgc

SEQ ID NO: 3666 - RNA, 19 nt, synthetic construct
  source 1..19: mol_type = other RNA
gtgtcctgcggggaaggtg

SEQ ID NO: 3667 - RNA, 19 nt, synthetic construct
  source 1..19: mol_type = other RNA
tgtgtcctgcggggaaggt

SEQ ID NO: 3668 - RNA, 19 nt, synthetic construct
  source 1..19: mol_type = other RNA
ttgtgtcctgcggggaagg

SEQ ID NO: 3669 - RNA, 19 nt, synthetic construct
  source 1..19: mol_type = other RNA
cttgtgtcctgcggggaag

SEQ ID NO: 3670 - RNA, 19 nt, synthetic construct
  source 1..19: mol_type = other RNA
acttgtgtcctgcggggaa

SEQ ID NO: 3671 - RNA, 19 nt, synthetic construct
  source 1..19: mol_type = other RNA
cacttgtgtcctgcgggga

SEQ ID NO: 3672 - RNA, 19 nt, synthetic construct
  source 1..19: mol_type = other RNA
gcacttgtgtcctgcgggg

SEQ ID NO: 3673 - RNA, 19 nt, synthetic construct
  source 1..19: mol_type = other RNA
ggcacttgtgtcctgcggg

SEQ ID NO: 3674 - RNA, 19 nt, synthetic construct
  source 1..19: mol_type = other RNA
tggcacttgtgtcctgcgg

SEQ ID NO: 3675 - RNA, 19 nt, synthetic construct
  source 1..19: mol_type = other RNA
ctggcacttgtgtcctgcg

SEQ ID NO: 3676 - RNA, 19 nt, synthetic construct
  source 1..19: mol_type = other RNA
tctggcacttgtgtcctgc

SEQ ID NO: 3677 - RNA, 19 nt, synthetic construct
  source 1..19: mol_type = other RNA
atctggcacttgtgtcctg

SEQ ID NO: 3678 - RNA, 19 nt, synthetic construct
  source 1..19: mol_type = other RNA
aatctggcacttgtgtcct

SEQ ID NO: 3679 - RNA, 19 nt, synthetic construct
  source 1..19: mol_type = other RNA
caatctggcacttgtgtcc

SEQ ID NO: 3680 - RNA, 19 nt, synthetic construct
  source 1..19: mol_type = other RNA
gcaatctggcacttgtgtc

SEQ ID NO: 3681 - RNA, 19 nt, synthetic construct
  source 1..19: mol_type = other RNA
cgcaatctggcacttgtgt

SEQ ID NO: 3682 - RNA, 19 nt, synthetic construct
  source 1..19: mol_type = other RNA
ccgcaatctggcacttgtg

SEQ ID NO: 3683 - RNA, 19 nt, synthetic construct
  source 1..19: mol_type = other RNA
cccgcaatctggcacttgt

SEQ ID NO: 3684 - RNA, 19 nt, synthetic construct
  source 1..19: mol_type = other RNA
gcccgcaatctggcacttg

SEQ ID NO: 3685 - RNA, 19 nt, synthetic construct
  source 1..19: mol_type = other RNA
agcccgcaatctggcactt

SEQ ID NO: 3686 - RNA, 19 nt, synthetic construct
  source 1..19: mol_type = other RNA
cagcccgcaatctggcact

SEQ ID NO: 3687 - RNA, 19 nt, synthetic construct
  source 1..19: mol_type = other RNA
ccagcccgcaatctggcac

SEQ ID NO: 3688 - RNA, 19 nt, synthetic construct
  source 1..19: mol_type = other RNA
cccagcccgcaatctggca

SEQ ID NO: 3689 - RNA, 19 nt, synthetic construct
  source 1..19: mol_type = other RNA
ccccagcccgcaatctggc

SEQ ID NO: 3690 - RNA, 19 nt, synthetic construct
  source 1..19: mol_type = other RNA
gccccagcccgcaatctgg

SEQ ID NO: 3691 - RNA, 19 nt, synthetic construct
  source 1..19: mol_type = other RNA
ggccccagcccgcaatctg

SEQ ID NO: 3692 - RNA, 19 nt, synthetic construct
  source 1..19: mol_type = other RNA
tggccccagcccgcaatct

SEQ ID NO: 3693 - RNA, 19 nt, synthetic construct
  source 1..19: mol_type = other RNA
gtggccccagcccgcaatc

SEQ ID NO: 3694 - RNA, 19 nt, synthetic construct
  source 1..19: mol_type = other RNA
agtggccccagcccgcaat

SEQ ID NO: 3695 - RNA, 19 nt, synthetic construct
  source 1..19: mol_type = other RNA
aagtggccccagcccgcaa

SEQ ID NO: 3696 - RNA, 19 nt, synthetic construct
  source 1..19: mol_type = other RNA
caagtggccccagcccgca

SEQ ID NO: 3697 - RNA, 19 nt, synthetic construct
  source 1..19: mol_type = other RNA
ccaagtggccccagcccgc

SEQ ID NO: 3698 - RNA, 19 nt, synthetic construct
  source 1..19: mol_type = other RNA
tccaagtggccccagcccg

SEQ ID NO: 3699 - RNA, 19 nt, synthetic construct
  source 1..19: mol_type = other RNA
atccaagtggccccagccc

SEQ ID NO: 3700 - RNA, 19 nt, synthetic construct
  source 1..19: mol_type = other RNA
catccaagtggccccagcc

SEQ ID NO: 3701 - RNA, 19 nt, synthetic construct
  source 1..19: mol_type = other RNA
tcatccaagtggccccagc

SEQ ID NO: 3702 - RNA, 19 nt, synthetic construct
  source 1..19: mol_type = other RNA
ctcatccaagtggccccag

SEQ ID NO: 3703 - RNA, 19 nt, synthetic construct
  source 1..19: mol_type = other RNA
tctcatccaagtggcccca

SEQ ID NO: 3704 - RNA, 19 nt, synthetic construct
  source 1..19: mol_type = other RNA
ttctcatccaagtggcccc

SEQ ID NO: 3705 - RNA, 19 nt, synthetic construct
  source 1..19: mol_type = other RNA
gttctcatccaagtggccc

SEQ ID NO: 3706 - RNA, 19 nt, synthetic construct
  source 1..19: mol_type = other RNA
cgttctcatccaagtggcc

SEQ ID NO: 3707 - RNA, 19 nt, synthetic construct
  source 1..19: mol_type = other RNA
acgttctcatccaagtggc

SEQ ID NO: 3708 - RNA, 19 nt, synthetic construct
  source 1..19: mol_type = other RNA
cacgttctcatccaagtgg

SEQ ID NO: 3709 - RNA, 19 nt, synthetic construct
  source 1..19: mol_type = other RNA
tcacgttctcatccaagtg

SEQ ID NO: 3710 - RNA, 19 nt, synthetic construct
  source 1..19: mol_type = other RNA
ctcacgttctcatccaagt

SEQ ID NO: 3711 - RNA, 19 nt, synthetic construct
  source 1..19: mol_type = other RNA
gctcacgttctcatccaag

SEQ ID NO: 3712 - RNA, 19 nt, synthetic construct
  source 1..19: mol_type = other RNA
cgctcacgttctcatccaa

SEQ ID NO: 3713 - RNA, 19 nt, synthetic construct
  source 1..19: mol_type = other RNA
ccgctcacgttctcatcca

SEQ ID NO: 3714 - RNA, 19 nt, synthetic construct
  source 1..19: mol_type = other RNA
gccgctcacgttctcatcc

SEQ ID NO: 3715 - RNA, 19 nt, synthetic construct
  source 1..19: mol_type = other RNA
agccgctcacgttctcatc

SEQ ID NO: 3716 - RNA, 19 nt, synthetic construct
  source 1..19: mol_type = other RNA
tagccgctcacgttctcat

SEQ ID NO: 3717 - RNA, 19 nt, synthetic construct
  source 1..19: mol_type = other RNA
gtagccgctcacgttctca

SEQ ID NO: 3718 - RNA, 19 nt, synthetic construct
  source 1..19: mol_type = other RNA
agtagccgctcacgttctc

SEQ ID NO: 3719 - RNA, 19 nt, synthetic construct
  source 1..19: mol_type = other RNA
gagtagccgctcacgttct

SEQ ID NO: 3720 - RNA, 19 nt, synthetic construct
  source 1..19: mol_type = other RNA
ggagtagccgctcacgttc

SEQ ID NO: 3721 - RNA, 19 nt, synthetic construct
  source 1..19: mol_type = other RNA
tggagtagccgctcacgtt

SEQ ID NO: 3722 - RNA, 19 nt, synthetic construct
  source 1..19: mol_type = other RNA
ctggagtagccgctcacgt

SEQ ID NO: 3723 - RNA, 19 nt, synthetic construct
  source 1..19: mol_type = other RNA
gctggagtagccgctcacg

SEQ ID NO: 3724 - RNA, 19 nt, synthetic construct
  source 1..19: mol_type = other RNA
agctggagtagccgctcac

SEQ ID NO: 3725 - RNA, 19 nt, synthetic construct
  source 1..19: mol_type = other RNA
gagctggagtagccgctca

SEQ ID NO: 3726 - RNA, 19 nt, synthetic construct
  source 1..19: mol_type = other RNA
ggagctggagtagccgctc

SEQ ID NO: 3727 - RNA, 19 nt, synthetic construct
  source 1..19: mol_type = other RNA
gggagctggagtagccgct

SEQ ID NO: 3728 - RNA, 19 nt, synthetic construct
  source 1..19: mol_type = other RNA
agggagctggagtagccgc

SEQ ID NO: 3729 - RNA, 19 nt, synthetic construct
  source 1..19: mol_type = other RNA
cagggagctggagtagccg

SEQ ID NO: 3730 - RNA, 19 nt, synthetic construct
  source 1..19: mol_type = other RNA
gcagggagctggagtagcc

SEQ ID NO: 3731 - RNA, 19 nt, synthetic construct
  source 1..19: mol_type = other RNA
cgcagggagctggagtagc

SEQ ID NO: 3732 - RNA, 19 nt, synthetic construct
  source 1..19: mol_type = other RNA
ccgcagggagctggagtag

SEQ ID NO: 3733 - RNA, 19 nt, synthetic construct
  source 1..19: mol_type = other RNA
cccgcagggagctggagta

SEQ ID NO: 3734 - RNA, 19 nt, synthetic construct
  source 1..19: mol_type = other RNA
tcccgcagggagctggagt

SEQ ID NO: 3735 - RNA, 19 nt, synthetic construct
  source 1..19: mol_type = other RNA
ctcccgcagggagctggag

SEQ ID NO: 3736 - RNA, 19 nt, synthetic construct
  source 1..19: mol_type = other RNA
cctcccgcagggagctgga

SEQ ID NO: 3737 - RNA, 19 nt, synthetic construct
  source 1..19: mol_type = other RNA
gcctcccgcagggagctgg

SEQ ID NO: 3738 - RNA, 19 nt, synthetic construct
  source 1..19: mol_type = other RNA
ggcctcccgcagggagctg

SEQ ID NO: 3739 - RNA, 19 nt, synthetic construct
  source 1..19: mol_type = other RNA
gggcctcccgcagggagct

SEQ ID NO: 3740 - RNA, 19 nt, synthetic construct
  source 1..19: mol_type = other RNA
agggcctcccgcagggagc

SEQ ID NO: 3741 - RNA, 19 nt, synthetic construct
  source 1..19: mol_type = other RNA
cagggcctcccgcagggag

SEQ ID NO: 3742 - RNA, 19 nt, synthetic construct
  source 1..19: mol_type = other RNA
ccagggcctcccgcaggga

SEQ ID NO: 3743 - RNA, 19 nt, synthetic construct
  source 1..19: mol_type = other RNA
accagggcctcccgcaggg

SEQ ID NO: 3744 - RNA, 19 nt, synthetic construct
  source 1..19: mol_type = other RNA
gaccagggcctcccgcagg

SEQ ID NO: 3745 - RNA, 19 nt, synthetic construct
  source 1..19: mol_type = other RNA
ggaccagggcctcccgcag

SEQ ID NO: 3746 - RNA, 19 nt, synthetic construct
  source 1..19: mol_type = other RNA
gggaccagggcctcccgca

SEQ ID NO: 3747 - RNA, 19 nt, synthetic construct
  source 1..19: mol_type = other RNA
ggggaccagggcctcccgc

SEQ ID NO: 3748 - RNA, 19 nt, synthetic construct
  source 1..19: mol_type = other RNA
gggggaccagggcctcccg

SEQ ID NO: 3749 - RNA, 19 nt, synthetic construct
  source 1..19: mol_type = other RNA
agggggaccagggcctccc

SEQ ID NO: 3750 - RNA, 19 nt, synthetic construct
  source 1..19: mol_type = other RNA
cagggggaccagggcctcc

SEQ ID NO: 3751 - RNA, 19 nt, synthetic construct
  source 1..19: mol_type = other RNA
ccagggggaccagggcctc

SEQ ID NO: 3752 - RNA, 19 nt, synthetic construct
  source 1..19: mol_type = other RNA
accagggggaccagggcct

SEQ ID NO: 3753 - RNA, 19 nt, synthetic construct
  source 1..19: mol_type = other RNA
gaccagggggaccagggcc

SEQ ID NO: 3754 - RNA, 19 nt, synthetic construct
  source 1..19: mol_type = other RNA
cgaccagggggaccagggc

SEQ ID NO: 3755 - RNA, 19 nt, synthetic construct
  source 1..19: mol_type = other RNA
gcgaccagggggaccaggg

SEQ ID NO: 3756 - RNA, 19 nt, synthetic construct
  source 1..19: mol_type = other RNA
ggcgaccagggggaccagg

SEQ ID NO: 3757 - RNA, 19 nt, synthetic construct
  source 1..19: mol_type = other RNA
cggcgaccagggggaccag

SEQ ID NO: 3758 - RNA, 19 nt, synthetic construct
  source 1..19: mol_type = other RNA
tcggcgaccagggggacca

SEQ ID NO: 3759 - DNA, 19 bp, synthetic construct
  source 1..19: mol_type = other DNA
gtcggcgaccagggggacc

SEQ ID NO: 3760 - RNA, 19 nt, synthetic construct
  source 1..19: mol_type = other RNA
ggtcggcgaccagggggac

SEQ ID NO: 3761 - RNA, 19 nt, synthetic construct
  source 1..19: mol_type = other RNA
tggtcggcgaccaggggga

SEQ ID NO: 3762 - RNA, 19 nt, synthetic construct
  source 1..19: mol_type = other RNA
gtggtcggcgaccaggggg

SEQ ID NO: 3763 - RNA, 19 nt, synthetic construct
  source 1..19: mol_type = other RNA
tgtggtcggcgaccagggg

SEQ ID NO: 3764 - RNA, 19 nt, synthetic construct
  source 1..19: mol_type = other RNA
ttgtggtcggcgaccaggg

SEQ ID NO: 3765 - RNA, 19 nt, synthetic construct
  source 1..19: mol_type = other RNA
cttgtggtcggcgaccagg

SEQ ID NO: 3766 - RNA, 19 nt, synthetic construct
  source 1..19: mol_type = other RNA
acttgtggtcggcgaccag

SEQ ID NO: 3767 - RNA, 19 nt, synthetic construct
  source 1..19: mol_type = other RNA
cacttgtggtcggcgacca

SEQ ID NO: 3768 - RNA, 19 nt, synthetic construct
  source 1..19: mol_type = other RNA
gcacttgtggtcggcgacc

SEQ ID NO: 3769 - RNA, 19 nt, synthetic construct
  source 1..19: mol_type = other RNA
tgcacttgtggtcggcgac

SEQ ID NO: 3770 - RNA, 19 nt, synthetic construct
  source 1..19: mol_type = other RNA
ctgcacttgtggtcggcga

SEQ ID NO: 3771 - RNA, 19 nt, synthetic construct
  source 1..19: mol_type = other RNA
gctgcacttgtggtcggcg

SEQ ID NO: 3772 - RNA, 19 nt, synthetic construct
  source 1..19: mol_type = other RNA
tgctgcacttgtggtcggc

SEQ ID NO: 3773 - RNA, 19 nt, synthetic construct
  source 1..19: mol_type = other RNA
ctgctgcacttgtggtcgg

SEQ ID NO: 3774 - RNA, 19 nt, synthetic construct
  source 1..19: mol_type = other RNA
gctgctgcacttgtggtcg

SEQ ID NO: 3775 - RNA, 19 nt, synthetic construct
  source 1..19: mol_type = other RNA
ggctgctgcacttgtggtc

SEQ ID NO: 3776 - RNA, 19 nt, synthetic construct
  source 1..19: mol_type = other RNA
gggctgctgcacttgtggt

SEQ ID NO: 3777 - RNA, 19 nt, synthetic construct
  source 1..19: mol_type = other RNA
agggctgctgcacttgtgg

SEQ ID NO: 3778 - RNA, 19 nt, synthetic construct
  source 1..19: mol_type = other RNA
cagggctgctgcacttgtg

SEQ ID NO: 3779 - RNA, 19 nt, synthetic construct
  source 1..19: mol_type = other RNA
tcagggctgctgcacttgt

SEQ ID NO: 3780 - RNA, 19 nt, synthetic construct
  source 1..19: mol_type = other RNA
ctcagggctgctgcacttg

SEQ ID NO: 3781 - RNA, 19 nt, synthetic construct
  source 1..19: mol_type = other RNA
cctcagggctgctgcactt

SEQ ID NO: 3782 - RNA, 19 nt, synthetic construct
  source 1..19: mol_type = other RNA
acctcagggctgctgcact

SEQ ID NO: 3783 - RNA, 19 nt, synthetic construct
  source 1..19: mol_type = other RNA
gacctcagggctgctgcac

SEQ ID NO: 3784 - RNA, 19 nt, synthetic construct
  source 1..19: mol_type = other RNA
agacctcagggctgctgca

SEQ ID NO: 3785 - RNA, 19 nt, synthetic construct
  source 1..19: mol_type = other RNA
tagacctcagggctgctgc

SEQ ID NO: 3786 - RNA, 19 nt, synthetic construct
  source 1..19: mol_type = other RNA
gtagacctcagggctgctg

SEQ ID NO: 3787 - RNA, 19 nt, synthetic construct
  source 1..19: mol_type = other RNA
cgtagacctcagggctgct

SEQ ID NO: 3788 - RNA, 19 nt, synthetic construct
  source 1..19: mol_type = other RNA
ccgtagacctcagggctgc

SEQ ID NO: 3789 - RNA, 19 nt, synthetic construct
  source 1..19: mol_type = other RNA
gccgtagacctcagggctg

SEQ ID NO: 3790 - RNA, 19 nt, synthetic construct
  source 1..19: mol_type = other RNA
cgccgtagacctcagggct

SEQ ID NO: 3791 - RNA, 19 nt, synthetic construct
  source 1..19: mol_type = other RNA
gcgccgtagacctcagggc

SEQ ID NO: 3792 - RNA, 19 nt, synthetic construct
  source 1..19: mol_type = other RNA
ggcgccgtagacctcaggg

SEQ ID NO: 3793 - RNA, 19 nt, synthetic construct
  source 1..19: mol_type = other RNA
cggcgccgtagacctcagg

SEQ ID NO: 3794 - RNA, 19 nt, synthetic construct
  source 1..19: mol_type = other RNA
tcggcgccgtagacctcag

SEQ ID NO: 3795 - RNA, 19 nt, synthetic construct
  source 1..19: mol_type = other RNA
gtcggcgccgtagacctca

SEQ ID NO: 3796 - RNA, 19 nt, synthetic construct
  source 1..19: mol_type = other RNA
tgtcggcgccgtagacctc

SEQ ID NO: 3797 - RNA, 19 nt, synthetic construct
  source 1..19: mol_type = other RNA
atgtcggcgccgtagacct

SEQ ID NO: 3798 - RNA, 19 nt, synthetic construct
  source 1..19: mol_type = other RNA
gatgtcggcgccgtagacc

SEQ ID NO: 3799 - RNA, 19 nt, synthetic construct
  source 1..19: mol_type = other RNA
tgatgtcggcgccgtagac

SEQ ID NO: 3800 - RNA, 19 nt, synthetic construct
  source 1..19: mol_type = other RNA
ctgatgtcggcgccgtaga

SEQ ID NO: 3801 - RNA, 19 nt, synthetic construct
  source 1..19: mol_type = other RNA
gctgatgtcggcgccgtag

SEQ ID NO: 3802 - RNA, 19 nt, synthetic construct
  source 1..19: mol_type = other RNA
ggctgatgtcggcgccgta

SEQ ID NO: 3803 - RNA, 19 nt, synthetic construct
  source 1..19: mol_type = other RNA
gggctgatgtcggcgccgt

SEQ ID NO: 3804 - RNA, 19 nt, synthetic construct
  source 1..19: mol_type = other RNA
ggggctgatgtcggcgccg

SEQ ID NO: 3805 - RNA, 19 nt, synthetic construct
  source 1..19: mol_type = other RNA
tggggctgatgtcggcgcc

SEQ ID NO: 3806 - RNA, 19 nt, synthetic construct
  source 1..19: mol_type = other RNA
ttggggctgatgtcggcgc

SEQ ID NO: 3807 - RNA, 19 nt, synthetic construct
  source 1..19: mol_type = other RNA
gttggggctgatgtcggcg

SEQ ID NO: 3808 - RNA, 19 nt, synthetic construct
  source 1..19: mol_type = other RNA
tgttggggctgatgtcggc

SEQ ID NO: 3809 - RNA, 19 nt, synthetic construct
  source 1..19: mol_type = other RNA
atgttggggctgatgtcgg

SEQ ID NO: 3810 - RNA, 19 nt, synthetic construct
  source 1..19: mol_type = other RNA
catgttggggctgatgtcg

SEQ ID NO: 3811 - RNA, 19 nt, synthetic construct
  source 1..19: mol_type = other RNA
gcatgttggggctgatgtc

SEQ ID NO: 3812 - RNA, 19 nt, synthetic construct
  source 1..19: mol_type = other RNA
agcatgttggggctgatgt

SEQ ID NO: 3813 - RNA, 19 nt, synthetic construct
  source 1..19: mol_type = other RNA
gagcatgttggggctgatg

SEQ ID NO: 3814 - RNA, 19 nt, synthetic construct
  source 1..19: mol_type = other RNA
agagcatgttggggctgat

SEQ ID NO: 3815 - RNA, 19 nt, synthetic construct
  source 1..19: mol_type = other RNA
cagagcatgttggggctga

SEQ ID NO: 3816 - RNA, 19 nt, synthetic construct
  source 1..19: mol_type = other RNA
acagagcatgttggggctg

SEQ ID NO: 3817 - RNA, 19 nt, synthetic construct
  source 1..19: mol_type = other RNA
cacagagcatgttggggct

SEQ ID NO: 3818 - RNA, 19 nt, synthetic construct
  source 1..19: mol_type = other RNA
gcacagagcatgttggggc

SEQ ID NO: 3819 - RNA, 19 nt, synthetic construct
  source 1..19: mol_type = other RNA
ggcacagagcatgttgggg

SEQ ID NO: 3820 - RNA, 19 nt, synthetic construct
  source 1..19: mol_type = other RNA
cggcacagagcatgttggg

SEQ ID NO: 3821 - RNA, 19 nt, synthetic construct
  source 1..19: mol_type = other RNA
ccggcacagagcatgttgg

SEQ ID NO: 3822 - RNA, 19 nt, synthetic construct
  source 1..19: mol_type = other RNA
gccggcacagagcatgttg

SEQ ID NO: 3823 - RNA, 19 nt, synthetic construct
  source 1..19: mol_type = other RNA
agccggcacagagcatgtt

SEQ ID NO: 3824 - RNA, 19 nt, synthetic construct
  source 1..19: mol_type = other RNA
tagccggcacagagcatgt

SEQ ID NO: 3825 - RNA, 19 nt, synthetic construct
  source 1..19: mol_type = other RNA
gtagccggcacagagcatg

SEQ ID NO: 3826 - RNA, 19 nt, synthetic construct
  source 1..19: mol_type = other RNA
agtagccggcacagagcat

SEQ ID NO: 3827 - RNA, 19 nt, synthetic construct
  source 1..19: mol_type = other RNA
aagtagccggcacagagca

SEQ ID NO: 3828 - RNA, 19 nt, synthetic construct
  source 1..19: mol_type = other RNA
gaagtagccggcacagagc

SEQ ID NO: 3829 - RNA, 19 nt, synthetic construct
  source 1..19: mol_type = other RNA
cgaagtagccggcacagag

SEQ ID NO: 3830 - RNA, 19 nt, synthetic construct
  source 1..19: mol_type = other RNA
tcgaagtagccggcacaga

SEQ ID NO: 3831 - RNA, 19 nt, synthetic construct
  source 1..19: mol_type = other RNA
gtcgaagtagccggcacag

SEQ ID NO: 3832 - RNA, 19 nt, synthetic construct
  source 1..19: mol_type = other RNA
agtcgaagtagccggcaca

SEQ ID NO: 3833 - RNA, 19 nt, synthetic construct
  source 1..19: mol_type = other RNA
cagtcgaagtagccggcac

SEQ ID NO: 3834 - RNA, 19 nt, synthetic construct
  source 1..19: mol_type = other RNA
gcagtcgaagtagccggca

SEQ ID NO: 3835 - RNA, 19 nt, synthetic construct
  source 1..19: mol_type = other RNA
tgcagtcgaagtagccggc

SEQ ID NO: 3836 - RNA, 19 nt, synthetic construct
  source 1..19: mol_type = other RNA
ttgcagtcgaagtagccgg

SEQ ID NO: 3837 - RNA, 19 nt, synthetic construct
  source 1..19: mol_type = other RNA
cttgcagtcgaagtagccg

SEQ ID NO: 3838 - RNA, 19 nt, synthetic construct
  source 1..19: mol_type = other RNA
acttgcagtcgaagtagcc

SEQ ID NO: 3839 - RNA, 19 nt, synthetic construct
  source 1..19: mol_type = other RNA
gacttgcagtcgaagtagc

SEQ ID NO: 3840 - RNA, 19 nt, synthetic construct
  source 1..19: mol_type = other RNA
ggacttgcagtcgaagtag

SEQ ID NO: 3841 - RNA, 19 nt, synthetic construct
  source 1..19: mol_type = other RNA
cggacttgcagtcgaagta

SEQ ID NO: 3842 - RNA, 19 nt, synthetic construct
  source 1..19: mol_type = other RNA
tcggacttgcagtcgaagt

SEQ ID NO: 3843 - RNA, 19 nt, synthetic construct
  source 1..19: mol_type = other RNA
gtcggacttgcagtcgaag

SEQ ID NO: 3844 - RNA, 19 nt, synthetic construct
  source 1..19: mol_type = other RNA
cgtcggacttgcagtcgaa

SEQ ID NO: 3845 - RNA, 19 nt, synthetic construct
  source 1..19: mol_type = other RNA
gcgtcggacttgcagtcga

SEQ ID NO: 3846 - RNA, 19 nt, synthetic construct
  source 1..19: mol_type = other RNA
ggcgtcggacttgcagtcg

SEQ ID NO: 3847 - RNA, 19 nt, synthetic construct
  source 1..19: mol_type = other RNA
aggcgtcggacttgcagtc

SEQ ID NO: 3848 - RNA, 19 nt, synthetic construct
  source 1..19: mol_type = other RNA
caggcgtcggacttgcagt

SEQ ID NO: 3849 - RNA, 19 nt, synthetic construct
  source 1..19: mol_type = other RNA
gcaggcgtcggacttgcag

SEQ ID NO: 3850 - RNA, 19 nt, synthetic construct
  source 1..19: mol_type = other RNA
ggcaggcgtcggacttgca

SEQ ID NO: 3851 - RNA, 19 nt, synthetic construct
  source 1..19: mol_type = other RNA
tggcaggcgtcggacttgc

SEQ ID NO: 3852 - RNA, 19 nt, synthetic construct
  source 1..19: mol_type = other RNA
ctggcaggcgtcggacttg

SEQ ID NO: 3853 - RNA, 19 nt, synthetic construct
  source 1..19: mol_type = other RNA
cctggcaggcgtcggactt

SEQ ID NO: 3854 - RNA, 19 nt, synthetic construct
  source 1..19: mol_type = other RNA
ccctggcaggcgtcggact

SEQ ID NO: 3855 - RNA, 19 nt, synthetic construct
  source 1..19: mol_type = other RNA
cccctggcaggcgtcggac

SEQ ID NO: 3856 - RNA, 19 nt, synthetic construct
  source 1..19: mol_type = other RNA
ccccctggcaggcgtcgga

SEQ ID NO: 3857 - RNA, 19 nt, synthetic construct
  source 1..19: mol_type = other RNA
tccccctggcaggcgtcgg

SEQ ID NO: 3858 - RNA, 19 nt, synthetic construct
  source 1..19: mol_type = other RNA
gtccccctggcaggcgtcg

SEQ ID NO: 3859 - RNA, 19 nt, synthetic construct
  source 1..19: mol_type = other RNA
agtccccctggcaggcgtc

SEQ ID NO: 3860 - RNA, 19 nt, synthetic construct
  source 1..19: mol_type = other RNA
gagtccccctggcaggcgt

SEQ ID NO: 3861 - RNA, 19 nt, synthetic construct
  source 1..19: mol_type = other RNA
tgagtccccctggcaggcg

SEQ ID NO: 3862 - RNA, 19 nt, synthetic construct
  source 1..19: mol_type = other RNA
ctgagtccccctggcaggc

SEQ ID NO: 3863 - RNA, 19 nt, synthetic construct
  source 1..19: mol_type = other RNA
cctgagtccccctggcagg

SEQ ID NO: 3864 - RNA, 19 nt, synthetic construct
  source 1..19: mol_type = other RNA
ccctgagtccccctggcag

SEQ ID NO: 3865 - RNA, 19 nt, synthetic construct
  source 1..19: mol_type = other RNA
cccctgagtccccctggca

SEQ ID NO: 3866 - RNA, 19 nt, synthetic construct
  source 1..19: mol_type = other RNA
ccccctgagtccccctggc

SEQ ID NO: 3867 - RNA, 19 nt, synthetic construct
  source 1..19: mol_type = other RNA
cccccctgagtccccctgg

SEQ ID NO: 3868 - RNA, 19 nt, synthetic construct
  source 1..19: mol_type = other RNA
gcccccctgagtccccctg

SEQ ID NO: 3869 - RNA, 19 nt, synthetic construct
  source 1..19: mol_type = other RNA
ggcccccctgagtccccct

SEQ ID NO: 3870 - RNA, 19 nt, synthetic construct
  source 1..19: mol_type = other RNA
gggcccccctgagtccccc

SEQ ID NO: 3871 - RNA, 19 nt, synthetic construct
  source 1..19: mol_type = other RNA
ggggcccccctgagtcccc

SEQ ID NO: 3872 - RNA, 19 nt, synthetic construct
  source 1..19: mol_type = other RNA
aggggcccccctgagtccc

SEQ ID NO: 3873 - RNA, 19 nt, synthetic construct
  source 1..19: mol_type = other RNA
caggggcccccctgagtcc

SEQ ID NO: 3874 - RNA, 19 nt, synthetic construct
  source 1..19: mol_type = other RNA
ccaggggcccccctgagtc

SEQ ID NO: 3875 - RNA, 19 nt, synthetic construct
  source 1..19: mol_type = other RNA
gccaggggcccccctgagt

SEQ ID NO: 3876 - RNA, 19 nt, synthetic construct
  source 1..19: mol_type = other RNA
ggccaggggcccccctgag

SEQ ID NO: 3877 - RNA, 19 nt, synthetic construct
  source 1..19: mol_type = other RNA
aggccaggggcccccctga

SEQ ID NO: 3878 - RNA, 19 nt, synthetic construct
  source 1..19: mol_type = other RNA
caggccaggggcccccctg

SEQ ID NO: 3879 - RNA, 19 nt, synthetic construct
  source 1..19: mol_type = other RNA
gcaggccaggggcccccct

SEQ ID NO: 3880 - RNA, 19 nt, synthetic construct
  source 1..19: mol_type = other RNA
cgcaggccaggggcccccc

SEQ ID NO: 3881 - RNA, 19 nt, synthetic construct
  source 1..19: mol_type = other RNA
tcgcaggccaggggccccc

SEQ ID NO: 3882 - RNA, 19 nt, synthetic construct
  source 1..19: mol_type = other RNA
ctcgcaggccaggggcccc

SEQ ID NO: 3883 - RNA, 19 nt, synthetic construct
  source 1..19: mol_type = other RNA
tctcgcaggccaggggccc

SEQ ID NO: 3884 - RNA, 19 nt, synthetic construct
  source 1..19: mol_type = other RNA
ttctcgcaggccaggggcc

SEQ ID NO: 3885 - RNA, 19 nt, synthetic construct
  source 1..19: mol_type = other RNA
cttctcgcaggccaggggc

SEQ ID NO: 3886 - RNA, 19 nt, synthetic construct
  source 1..19: mol_type = other RNA
tcttctcgcaggccagggg

SEQ ID NO: 3887 - RNA, 19 nt, synthetic construct
  source 1..19: mol_type = other RNA
ttcttctcgcaggccaggg

SEQ ID NO: 3888 - RNA, 19 nt, synthetic construct
  source 1..19: mol_type = other RNA
gttcttctcgcaggccagg

SEQ ID NO: 3889 - RNA, 19 nt, synthetic construct
  source 1..19: mol_type = other RNA
cgttcttctcgcaggccag

SEQ ID NO: 3890 - RNA, 19 nt, synthetic construct
  source 1..19: mol_type = other RNA
ccgttcttctcgcaggcca

SEQ ID NO: 3891 - RNA, 19 nt, synthetic construct
  source 1..19: mol_type = other RNA
gccgttcttctcgcaggcc

SEQ ID NO: 3892 - RNA, 19 nt, synthetic construct
  source 1..19: mol_type = other RNA
cgccgttcttctcgcaggc

SEQ ID NO: 3893 - RNA, 19 nt, synthetic construct
  source 1..19: mol_type = other RNA
acgccgttcttctcgcagg

SEQ ID NO: 3894 - RNA, 19 nt, synthetic construct
  source 1..19: mol_type = other RNA
cacgccgttcttctcgcag

SEQ ID NO: 3895 - RNA, 19 nt, synthetic construct
  source 1..19: mol_type = other RNA
ccacgccgttcttctcgca

SEQ ID NO: 3896 - RNA, 19 nt, synthetic construct
  source 1..19: mol_type = other RNA
gccacgccgttcttctcgc

SEQ ID NO: 3897 - RNA, 19 nt, synthetic construct
  source 1..19: mol_type = other RNA
agccacgccgttcttctcg

SEQ ID NO: 3898 - RNA, 19 nt, synthetic construct
  source 1..19: mol_type = other RNA
aagccacgccgttcttctc

SEQ ID NO: 3899 - RNA, 19 nt, synthetic construct
  source 1..19: mol_type = other RNA
taagccacgccgttcttct

SEQ ID NO: 3900 - RNA, 19 nt, synthetic construct
  source 1..19: mol_type = other RNA
gtaagccacgccgttcttc

SEQ ID NO: 3901 - RNA, 19 nt, synthetic construct
  source 1..19: mol_type = other RNA
ggtaagccacgccgttctt

SEQ ID NO: 3902 - RNA, 19 nt, synthetic construct
  source 1..19: mol_type = other RNA
aggtaagccacgccgttct

SEQ ID NO: 3903 - RNA, 19 nt, synthetic construct
  source 1..19: mol_type = other RNA
gaggtaagccacgccgttc

SEQ ID NO: 3904 - RNA, 19 nt, synthetic construct
  source 1..19: mol_type = other RNA
agaggtaagccacgccgtt

SEQ ID NO: 3905 - RNA, 19 nt, synthetic construct
  source 1..19: mol_type = other RNA
tagaggtaagccacgccgt

SEQ ID NO: 3906 - RNA, 19 nt, synthetic construct
  source 1..19: mol_type = other RNA
gtagaggtaagccacgccg

SEQ ID NO: 3907 - RNA, 19 nt, synthetic construct
  source 1..19: mol_type = other RNA
cgtagaggtaagccacgcc

SEQ ID NO: 3908 - RNA, 19 nt, synthetic construct
  source 1..19: mol_type = other RNA
ccgtagaggtaagccacgc

SEQ ID NO: 3909 - RNA, 19 nt, synthetic construct
  source 1..19: mol_type = other RNA
gccgtagaggtaagccacg

SEQ ID NO: 3910 - RNA, 19 nt, synthetic construct
  source 1..19: mol_type = other RNA
tgccgtagaggtaagccac

SEQ ID NO: 3911 - RNA, 19 nt, synthetic construct
  source 1..19: mol_type = other RNA
atgccgtagaggtaagcca

SEQ ID NO: 3912 - RNA, 19 nt, synthetic construct
  source 1..19: mol_type = other RNA
gatgccgtagaggtaagcc

SEQ ID NO: 3913 - RNA, 19 nt, synthetic construct
  source 1..19: mol_type = other RNA
tgatgccgtagaggtaagc

SEQ ID NO: 3914 - RNA, 19 nt, synthetic construct
  source 1..19: mol_type = other RNA
atgatgccgtagaggtaag

SEQ ID NO: 3915 - RNA, 19 nt, synthetic construct
  source 1..19: mol_type = other RNA
gatgatgccgtagaggtaa

SEQ ID NO: 3916 - RNA, 19 nt, synthetic construct
  source 1..19: mol_type = other RNA
tgatgatgccgtagaggta

SEQ ID NO: 3917 - RNA, 19 nt, synthetic construct
  source 1..19: mol_type = other RNA
ctgatgatgccgtagaggt

SEQ ID NO: 3918 - RNA, 19 nt, synthetic construct
  source 1..19: mol_type = other RNA
gctgatgatgccgtagagg

SEQ ID NO: 3919 - RNA, 19 nt, synthetic construct
  source 1..19: mol_type = other RNA
agctgatgatgccgtagag

SEQ ID NO: 3920 - RNA, 19 nt, synthetic construct
  source 1..19: mol_type = other RNA
cagctgatgatgccgtaga

SEQ ID NO: 3921 - RNA, 19 nt, synthetic construct
  source 1..19: mol_type = other RNA
ccagctgatgatgccgtag

SEQ ID NO: 3922 - RNA, 19 nt, synthetic construct
  source 1..19: mol_type = other RNA
cccagctgatgatgccgta

SEQ ID NO: 3923 - RNA, 19 nt, synthetic construct
  source 1..19: mol_type = other RNA
ccccagctgatgatgccgt

SEQ ID NO: 3924 - RNA, 19 nt, synthetic construct
  source 1..19: mol_type = other RNA
accccagctgatgatgccg

SEQ ID NO: 3925 - RNA, 19 nt, synthetic construct
  source 1..19: mol_type = other RNA
caccccagctgatgatgcc

SEQ ID NO: 3926 - RNA, 19 nt, synthetic construct
  source 1..19: mol_type = other RNA
tcaccccagctgatgatgc

SEQ ID NO: 3927 - RNA, 19 nt, synthetic construct
  source 1..19: mol_type = other RNA
gtcaccccagctgatgatg

SEQ ID NO: 3928 - RNA, 19 nt, synthetic construct
  source 1..19: mol_type = other RNA
cgtcaccccagctgatgat

SEQ ID NO: 3929 - RNA, 19 nt, synthetic construct
  source 1..19: mol_type = other RNA
ccgtcaccccagctgatga

SEQ ID NO: 3930 - RNA, 19 nt, synthetic construct
  source 1..19: mol_type = other RNA
gccgtcaccccagctgatg

SEQ ID NO: 3931 - RNA, 19 nt, synthetic construct
  source 1..19: mol_type = other RNA
agccgtcaccccagctgat

SEQ ID NO: 3932 - RNA, 19 nt, synthetic construct
  source 1..19: mol_type = other RNA
cagccgtcaccccagctga

SEQ ID NO: 3933 - RNA, 19 nt, synthetic construct
  source 1..19: mol_type = other RNA
gcagccgtcaccccagctg

SEQ ID NO: 3934 - RNA, 19 nt, synthetic construct
  source 1..19: mol_type = other RNA
cgcagccgtcaccccagct

SEQ ID NO: 3935 - RNA, 19 nt, synthetic construct
  source 1..19: mol_type = other RNA
ccgcagccgtcaccccagc

SEQ ID NO: 3936 - RNA, 19 nt, synthetic construct
  source 1..19: mol_type = other RNA
cccgcagccgtcaccccag

SEQ ID NO: 3937 - RNA, 19 nt, synthetic construct
  source 1..19: mol_type = other RNA
gcccgcagccgtcacccca

SEQ ID NO: 3938 - RNA, 19 nt, synthetic construct
  source 1..19: mol_type = other RNA
cgcccgcagccgtcacccc

SEQ ID NO: 3939 - RNA, 19 nt, synthetic construct
  source 1..19: mol_type = other RNA
ccgcccgcagccgtcaccc

SEQ ID NO: 3940 - RNA, 19 nt, synthetic construct
  source 1..19: mol_type = other RNA
gccgcccgcagccgtcacc

SEQ ID NO: 3941 - RNA, 19 nt, synthetic construct
  source 1..19: mol_type = other RNA
agccgcccgcagccgtcac

SEQ ID NO: 3942 - RNA, 19 nt, synthetic construct
  source 1..19: mol_type = other RNA
gagccgcccgcagccgtca

SEQ ID NO: 3943 - RNA, 19 nt, synthetic construct
  source 1..19: mol_type = other RNA
ggagccgcccgcagccgtc

SEQ ID NO: 3944 - RNA, 19 nt, synthetic construct
  source 1..19: mol_type = other RNA
tggagccgcccgcagccgt

SEQ ID NO: 3945 - RNA, 19 nt, synthetic construct
  source 1..19: mol_type = other RNA
gtggagccgcccgcagccg

SEQ ID NO: 3946 - RNA, 19 nt, synthetic construct
  source 1..19: mol_type = other RNA
tgtggagccgcccgcagcc

SEQ ID NO: 3947 - RNA, 19 nt, synthetic construct
  source 1..19: mol_type = other RNA
ttgtggagccgcccgcagc

SEQ ID NO: 3948 - RNA, 19 nt, synthetic construct
  source 1..19: mol_type = other RNA
cttgtggagccgcccgcag

SEQ ID NO: 3949 - RNA, 19 nt, synthetic construct
  source 1..19: mol_type = other RNA
gcttgtggagccgcccgca

SEQ ID NO: 3950 - RNA, 19 nt, synthetic construct
  source 1..19: mol_type = other RNA
ggcttgtggagccgcccgc

SEQ ID NO: 3951 - RNA, 19 nt, synthetic construct
  source 1..19: mol_type = other RNA
cggcttgtggagccgcccg

SEQ ID NO: 3952 - RNA, 19 nt, synthetic construct
  source 1..19: mol_type = other RNA
ccggcttgtggagccgccc

SEQ ID NO: 3953 - RNA, 19 nt, synthetic construct
  source 1..19: mol_type = other RNA
cccggcttgtggagccgcc

SEQ ID NO: 3954 - RNA, 19 nt, synthetic construct
  source 1..19: mol_type = other RNA
ccccggcttgtggagccgc

SEQ ID NO: 3955 - RNA, 19 nt, synthetic construct
  source 1..19: mol_type = other RNA
cccccggcttgtggagccg

SEQ ID NO: 3956 - RNA, 19 nt, synthetic construct
  source 1..19: mol_type = other RNA
acccccggcttgtggagcc

SEQ ID NO: 3957 - RNA, 19 nt, synthetic construct
  source 1..19: mol_type = other RNA
gacccccggcttgtggagc

SEQ ID NO: 3958 - RNA, 19 nt, synthetic construct
  source 1..19: mol_type = other RNA
agacccccggcttgtggag

SEQ ID NO: 3959 - RNA, 19 nt, synthetic construct
  source 1..19: mol_type = other RNA
tagacccccggcttgtgga

SEQ ID NO: 3960 - RNA, 19 nt, synthetic construct
  source 1..19: mol_type = other RNA
gtagacccccggcttgtgg

SEQ ID NO: 3961 - RNA, 19 nt, synthetic construct
  source 1..19: mol_type = other RNA
tgtagacccccggcttgtg

SEQ ID NO: 3962 - RNA, 19 nt, synthetic construct
  source 1..19: mol_type = other RNA
gtgtagacccccggcttgt

SEQ ID NO: 3963 - RNA, 19 nt, synthetic construct
  source 1..19: mol_type = other RNA
ggtgtagacccccggcttg

SEQ ID NO: 3964 - RNA, 19 nt, synthetic construct
  source 1..19: mol_type = other RNA
gggtgtagacccccggctt

SEQ ID NO: 3965 - RNA, 19 nt, synthetic construct
  source 1..19: mol_type = other RNA
cgggtgtagacccccggct

SEQ ID NO: 3966 - RNA, 19 nt, synthetic construct
  source 1..19: mol_type = other RNA
gcgggtgtagacccccggc

SEQ ID NO: 3967 - RNA, 19 nt, synthetic construct
  source 1..19: mol_type = other RNA
cgcgggtgtagacccccgg

SEQ ID NO: 3968 - RNA, 19 nt, synthetic construct
  source 1..19: mol_type = other RNA
acgcgggtgtagacccccg

SEQ ID NO: 3969 - RNA, 19 nt, synthetic construct
  source 1..19: mol_type = other RNA
cacgcgggtgtagaccccc

SEQ ID NO: 3970 - RNA, 19 nt, synthetic construct
  source 1..19: mol_type = other RNA
ccacgcgggtgtagacccc

SEQ ID NO: 3971 - RNA, 19 nt, synthetic construct
  source 1..19: mol_type = other RNA
gccacgcgggtgtagaccc

SEQ ID NO: 3972 - RNA, 19 nt, synthetic construct
  source 1..19: mol_type = other RNA
ggccacgcgggtgtagacc

SEQ ID NO: 3973 - RNA, 19 nt, synthetic construct
  source 1..19: mol_type = other RNA
tggccacgcgggtgtagac

SEQ ID NO: 3974 - RNA, 19 nt, synthetic construct
  source 1..19: mol_type = other RNA
ttggccacgcgggtgtaga

SEQ ID NO: 3975 - RNA, 19 nt, synthetic construct
  source 1..19: mol_type = other RNA
gttggccacgcgggtgtag

SEQ ID NO: 3976 - RNA, 19 nt, synthetic construct
  source 1..19: mol_type = other RNA
agttggccacgcgggtgta

SEQ ID NO: 3977 - RNA, 19 nt, synthetic construct
  source 1..19: mol_type = other RNA
tagttggccacgcgggtgt

SEQ ID NO: 3978 - RNA, 19 nt, synthetic construct
  source 1..19: mol_type = other RNA
atagttggccacgcgggtg

SEQ ID NO: 3979 - RNA, 19 nt, synthetic construct
  source 1..19: mol_type = other RNA
catagttggccacgcgggt

SEQ ID NO: 3980 - RNA, 19 nt, synthetic construct
  source 1..19: mol_type = other RNA
acatagttggccacgcggg

SEQ ID NO: 3981 - RNA, 19 nt, synthetic construct
  source 1..19: mol_type = other RNA
cacatagttggccacgcgg

SEQ ID NO: 3982 - RNA, 19 nt, synthetic construct
  source 1..19: mol_type = other RNA
ccacatagttggccacgcg

SEQ ID NO: 3983 - RNA, 19 nt, synthetic construct
  source 1..19: mol_type = other RNA
tccacatagttggccacgc

SEQ ID NO: 3984 - RNA, 19 nt, synthetic construct
  source 1..19: mol_type = other RNA
gtccacatagttggccacg

SEQ ID NO: 3985 - RNA, 19 nt, synthetic construct
  source 1..19: mol_type = other RNA
agtccacatagttggccac

SEQ ID NO: 3986 - RNA, 19 nt, synthetic construct
  source 1..19: mol_type = other RNA
cagtccacatagttggcca

SEQ ID NO: 3987 - RNA, 19 nt, synthetic construct
  source 1..19: mol_type = other RNA
ccagtccacatagttggcc

SEQ ID NO: 3988 - RNA, 19 nt, synthetic construct
  source 1..19: mol_type = other RNA
tccagtccacatagttggc

SEQ ID NO: 3989 - RNA, 19 nt, synthetic construct
  source 1..19: mol_type = other RNA
atccagtccacatagttgg

SEQ ID NO: 3990 - RNA, 19 nt, synthetic construct
  source 1..19: mol_type = other RNA
gatccagtccacatagttg

SEQ ID NO: 3991 - RNA, 19 nt, synthetic construct
  source 1..19: mol_type = other RNA
tgatccagtccacatagtt

SEQ ID NO: 3992 - RNA, 19 nt, synthetic construct
  source 1..19: mol_type = other RNA
ttgatccagtccacatagt

SEQ ID NO: 3993 - RNA, 19 nt, synthetic construct
  source 1..19: mol_type = other RNA
gttgatccagtccacatag

SEQ ID NO: 3994 - RNA, 19 nt, synthetic construct
  source 1..19: mol_type = other RNA
cgttgatccagtccacata

SEQ ID NO: 3995 - RNA, 19 nt, synthetic construct
  source 1..19: mol_type = other RNA
tcgttgatccagtccacat

SEQ ID NO: 3996 - RNA, 19 nt, synthetic construct
  source 1..19: mol_type = other RNA
gtcgttgatccagtccaca

SEQ ID NO: 3997 - RNA, 19 nt, synthetic construct
  source 1..19: mol_type = other RNA
ggtcgttgatccagtccac

SEQ ID NO: 3998 - RNA, 19 nt, synthetic construct
  source 1..19: mol_type = other RNA
cggtcgttgatccagtcca

SEQ ID NO: 3999 - RNA, 19 nt, synthetic construct
  source 1..19: mol_type = other RNA
ccggtcgttgatccagtcc

SEQ ID NO: 4000 - RNA, 19 nt, synthetic construct
  source 1..19: mol_type = other RNA
tccggtcgttgatccagtc

SEQ ID NO: 4001 - RNA, 19 nt, synthetic construct
  source 1..19: mol_type = other RNA
atccggtcgttgatccagt

SEQ ID NO: 4002 - RNA, 19 nt, synthetic construct
  source 1..19: mol_type = other RNA
tatccggtcgttgatccag

SEQ ID NO: 4003 - RNA, 19 nt, synthetic construct
  source 1..19: mol_type = other RNA
gtatccggtcgttgatcca

SEQ ID NO: 4004 - RNA, 19 nt, synthetic construct
  source 1..19: mol_type = other RNA
cgtatccggtcgttgatcc

SEQ ID NO: 4005 - RNA, 19 nt, synthetic construct
  source 1..19: mol_type = other RNA
ccgtatccggtcgttgatc

SEQ ID NO: 4006 - RNA, 19 nt, synthetic construct
  source 1..19: mol_type = other RNA
gccgtatccggtcgttgat

SEQ ID NO: 4007 - RNA, 19 nt, synthetic construct
  source 1..19: mol_type = other RNA
ggccgtatccggtcgttga

SEQ ID NO: 4008 - RNA, 19 nt, synthetic construct
  source 1..19: mol_type = other RNA
aggccgtatccggtcgttg

SEQ ID NO: 4009 - RNA, 19 nt, synthetic construct
  source 1..19: mol_type = other RNA
gaggccgtatccggtcgtt

SEQ ID NO: 4010 - RNA, 19 nt, synthetic construct
  source 1..19: mol_type = other RNA
ggaggccgtatccggtcgt

SEQ ID NO: 4011 - RNA, 19 nt, synthetic construct
  source 1..19: mol_type = other RNA
gggaggccgtatccggtcg

SEQ ID NO: 4012 - RNA, 19 nt, synthetic construct
  source 1..19: mol_type = other RNA
tgggaggccgtatccggtc

SEQ ID NO: 4013 - RNA, 19 nt, synthetic construct
  source 1..19: mol_type = other RNA
ctgggaggccgtatccggt

SEQ ID NO: 4014 - RNA, 19 nt, synthetic construct
  source 1..19: mol_type = other RNA
cctgggaggccgtatccgg

SEQ ID NO: 4015 - RNA, 19 nt, synthetic construct
  source 1..19: mol_type = other RNA
gcctgggaggccgtatccg

SEQ ID NO: 4016 - RNA, 19 nt, synthetic construct
  source 1..19: mol_type = other RNA
cgcctgggaggccgtatcc

SEQ ID NO: 4017 - RNA, 19 nt, synthetic construct
  source 1..19: mol_type = other RNA
ccgcctgggaggccgtatc

SEQ ID NO: 4018 - RNA, 19 nt, synthetic construct
  source 1..19: mol_type = other RNA
gccgcctgggaggccgtat

SEQ ID NO: 4019 - RNA, 19 nt, synthetic construct
  source 1..19: mol_type = other RNA
agccgcctgggaggccgta

SEQ ID NO: 4020 - RNA, 19 nt, synthetic construct
  source 1..19: mol_type = other RNA
aagccgcctgggaggccgt

SEQ ID NO: 4021 - RNA, 19 nt, synthetic construct
  source 1..19: mol_type = other RNA
caagccgcctgggaggccg

SEQ ID NO: 4022 - RNA, 19 nt, synthetic construct
  source 1..19: mol_type = other RNA
acaagccgcctgggaggcc

SEQ ID NO: 4023 - RNA, 19 nt, synthetic construct
  source 1..19: mol_type = other RNA
cacaagccgcctgggaggc

SEQ ID NO: 4024 - RNA, 19 nt, synthetic construct
  source 1..19: mol_type = other RNA
ccacaagccgcctgggagg

SEQ ID NO: 4025 - RNA, 19 nt, synthetic construct
  source 1..19: mol_type = other RNA
gccacaagccgcctgggag

SEQ ID NO: 4026 - RNA, 19 nt, synthetic construct
  source 1..19: mol_type = other RNA
agccacaagccgcctggga

SEQ ID NO: 4027 - RNA, 19 nt, synthetic construct
  source 1..19: mol_type = other RNA
gagccacaagccgcctggg

SEQ ID NO: 4028 - RNA, 19 nt, synthetic construct
  source 1..19: mol_type = other RNA
ggagccacaagccgcctgg

SEQ ID NO: 4029 - RNA, 19 nt, synthetic construct
  source 1..19: mol_type = other RNA
gggagccacaagccgcctg

SEQ ID NO: 4030 - RNA, 19 nt, synthetic construct
  source 1..19: mol_type = other RNA
agggagccacaagccgcct

SEQ ID NO: 4031 - RNA, 19 nt, synthetic construct
  source 1..19: mol_type = other RNA
gagggagccacaagccgcc

SEQ ID NO: 4032 - RNA, 19 nt, synthetic construct
  source 1..19: mol_type = other RNA
ggagggagccacaagccgc

SEQ ID NO: 4033 - RNA, 19 nt, synthetic construct
  source 1..19: mol_type = other RNA
aggagggagccacaagccg

SEQ ID NO: 4034 - RNA, 19 nt, synthetic construct
  source 1..19: mol_type = other RNA
caggagggagccacaagcc

SEQ ID NO: 4035 - RNA, 19 nt, synthetic construct
  source 1..19: mol_type = other RNA
tcaggagggagccacaagc

SEQ ID NO: 4036 - RNA, 19 nt, synthetic construct
  source 1..19: mol_type = other RNA
gtcaggagggagccacaag

SEQ ID NO: 4037 - RNA, 19 nt, synthetic construct
  source 1..19: mol_type = other RNA
ggtcaggagggagccacaa

SEQ ID NO: 4038 - RNA, 19 nt, synthetic construct
  source 1..19: mol_type = other RNA
gggtcaggagggagccaca

SEQ ID NO: 4039 - RNA, 19 nt, synthetic construct
  source 1..19: mol_type = other RNA
agggtcaggagggagccac

SEQ ID NO: 4040 - RNA, 19 nt, synthetic construct
  source 1..19: mol_type = other RNA
gagggtcaggagggagcca

SEQ ID NO: 4041 - RNA, 19 nt, synthetic construct
  source 1..19: mol_type = other RNA
ggagggtcaggagggagcc

SEQ ID NO: 4042 - RNA, 19 nt, synthetic construct
  source 1..19: mol_type = other RNA
tggagggtcaggagggagc

SEQ ID NO: 4043 - RNA, 19 nt, synthetic construct
  source 1..19: mol_type = other RNA
ctggagggtcaggagggag

SEQ ID NO: 4044 - RNA, 19 nt, synthetic construct
  source 1..19: mol_type = other RNA
gctggagggtcaggaggga

SEQ ID NO: 4045 - RNA, 19 nt, synthetic construct
  source 1..19: mol_type = other RNA
cgctggagggtcaggaggg

SEQ ID NO: 4046 - RNA, 19 nt, synthetic construct
  source 1..19: mol_type = other RNA
ccgctggagggtcaggagg

SEQ ID NO: 4047 - RNA, 19 nt, synthetic construct
  source 1..19: mol_type = other RNA
cccgctggagggtcaggag

SEQ ID NO: 4048 - RNA, 19 nt, synthetic construct
  source 1..19: mol_type = other RNA
tcccgctggagggtcagga

SEQ ID NO: 4049 - RNA, 19 nt, synthetic construct
  source 1..19: mol_type = other RNA
gtcccgctggagggtcagg

SEQ ID NO: 4050 - RNA, 19 nt, synthetic construct
  source 1..19: mol_type = other RNA
tgtcccgctggagggtcag

SEQ ID NO: 4051 - RNA, 19 nt, synthetic construct
  source 1..19: mol_type = other RNA
gtgtcccgctggagggtca

SEQ ID NO: 4052 - RNA, 19 nt, synthetic construct
  source 1..19: mol_type = other RNA
ggtgtcccgctggagggtc

SEQ ID NO: 4053 - RNA, 19 nt, synthetic construct
  source 1..19: mol_type = other RNA
gggtgtcccgctggagggt

SEQ ID NO: 4054 - RNA, 19 nt, synthetic construct
  source 1..19: mol_type = other RNA
agggtgtcccgctggaggg

SEQ ID NO: 4055 - RNA, 19 nt, synthetic construct
  source 1..19: mol_type = other RNA
cagggtgtcccgctggagg

SEQ ID NO: 4056 - RNA, 19 nt, synthetic construct
  source 1..19: mol_type = other RNA
ccagggtgtcccgctggag

SEQ ID NO: 4057 - RNA, 19 nt, synthetic construct
  source 1..19: mol_type = other RNA
accagggtgtcccgctgga

SEQ ID NO: 4058 - RNA, 19 nt, synthetic construct
  source 1..19: mol_type = other RNA
aaccagggtgtcccgctgg

SEQ ID NO: 4059 - RNA, 19 nt, synthetic construct
  source 1..19: mol_type = other RNA
gaaccagggtgtcccgctg

SEQ ID NO: 4060 - RNA, 19 nt, synthetic construct
  source 1..19: mol_type = other RNA
ggaaccagggtgtcccgct

SEQ ID NO: 4061 - RNA, 19 nt, synthetic construct
  source 1..19: mol_type = other RNA
gggaaccagggtgtcccgc

SEQ ID NO: 4062 - RNA, 19 nt, synthetic construct
  source 1..19: mol_type = other RNA
tgggaaccagggtgtcccg

SEQ ID NO: 4063 - RNA, 19 nt, synthetic construct
  source 1..19: mol_type = other RNA
gtgggaaccagggtgtccc

SEQ ID NO: 4064 - RNA, 19 nt, synthetic construct
  source 1..19: mol_type = other RNA
ggtgggaaccagggtgtcc

SEQ ID NO: 4065 - RNA, 19 nt, synthetic construct
  source 1..19: mol_type = other RNA
tggtgggaaccagggtgtc

SEQ ID NO: 4066 - RNA, 19 nt, synthetic construct
  source 1..19: mol_type = other RNA
atggtgggaaccagggtgt

SEQ ID NO: 4067 - RNA, 19 nt, synthetic construct
  source 1..19: mol_type = other RNA
aatggtgggaaccagggtg

SEQ ID NO: 4068 - RNA, 19 nt, synthetic construct
  source 1..19: mol_type = other RNA
gaatggtgggaaccagggt

SEQ ID NO: 4069 - RNA, 19 nt, synthetic construct
  source 1..19: mol_type = other RNA
ggaatggtgggaaccaggg

SEQ ID NO: 4070 - RNA, 19 nt, synthetic construct
  source 1..19: mol_type = other RNA
gggaatggtgggaaccagg

SEQ ID NO: 4071 - RNA, 19 nt, synthetic construct
  source 1..19: mol_type = other RNA
agggaatggtgggaaccag

SEQ ID NO: 4072 - RNA, 19 nt, synthetic construct
  source 1..19: mol_type = other RNA
cagggaatggtgggaacca

SEQ ID NO: 4073 - RNA, 19 nt, synthetic construct
  source 1..19: mol_type = other RNA
gcagggaatggtgggaacc

SEQ ID NO: 4074 - RNA, 19 nt, synthetic construct
  source 1..19: mol_type = other RNA
ggcagggaatggtgggaac

SEQ ID NO: 4075 - RNA, 19 nt, synthetic construct
  source 1..19: mol_type = other RNA
aggcagggaatggtgggaa

SEQ ID NO: 4076 - RNA, 19 nt, synthetic construct
  source 1..19: mol_type = other RNA
aaggcagggaatggtggga

SEQ ID NO: 4077 - RNA, 19 nt, synthetic construct
  source 1..19: mol_type = other RNA
caaggcagggaatggtggg

SEQ ID NO: 4078 - RNA, 19 nt, synthetic construct
  source 1..19: mol_type = other RNA
gcaaggcagggaatggtgg

SEQ ID NO: 4079 - RNA, 19 nt, synthetic construct
  source 1..19: mol_type = other RNA
agcaaggcagggaatggtg

SEQ ID NO: 4080 - RNA, 19 nt, synthetic construct
  source 1..19: mol_type = other RNA
cagcaaggcagggaatggt

SEQ ID NO: 4081 - RNA, 19 nt, synthetic construct
  source 1..19: mol_type = other RNA
tcagcaaggcagggaatgg

SEQ ID NO: 4082 - RNA, 19 nt, synthetic construct
  source 1..19: mol_type = other RNA
gtcagcaaggcagggaatg

SEQ ID NO: 4083 - RNA, 19 nt, synthetic construct
  source 1..19: mol_type = other RNA
tgtcagcaaggcagggaat

SEQ ID NO: 4084 - RNA, 19 nt, synthetic construct
  source 1..19: mol_type = other RNA
ttgtcagcaaggcagggaa

SEQ ID NO: 4085 - RNA, 19 nt, synthetic construct
  source 1..19: mol_type = other RNA
attgtcagcaaggcaggga

SEQ ID NO: 4086 - RNA, 19 nt, synthetic construct
  source 1..19: mol_type = other RNA
tattgtcagcaaggcaggg

SEQ ID NO: 4087 - RNA, 19 nt, synthetic construct
  source 1..19: mol_type = other RNA
ttattgtcagcaaggcagg

SEQ ID NO: 4088 - RNA, 19 nt, synthetic construct
  source 1..19: mol_type = other RNA
tttattgtcagcaaggcag

SEQ ID NO: 4089 - RNA, 19 nt, synthetic construct
  source 1..19: mol_type = other RNA
ctttattgtcagcaaggca

SEQ ID NO: 4090 - RNA, 19 nt, synthetic construct
  source 1..19: mol_type = other RNA
tctttattgtcagcaaggc

SEQ ID NO: 4091 - RNA, 19 nt, synthetic construct
  source 1..19: mol_type = other RNA
atctttattgtcagcaagg

SEQ ID NO: 4092 - RNA, 19 nt, synthetic construct
  source 1..19: mol_type = other RNA
tatctttattgtcagcaag

SEQ ID NO: 4093 - RNA, 19 nt, synthetic construct
  source 1..19: mol_type = other RNA
atatctttattgtcagcaa

SEQ ID NO: 4094 - RNA, 19 nt, synthetic construct
  source 1..19: mol_type = other RNA
aatatctttattgtcagca

SEQ ID NO: 4095 - RNA, 19 nt, synthetic construct
  source 1..19: mol_type = other RNA
aaatatctttattgtcagc

SEQ ID NO: 4096 - RNA, 19 nt, synthetic construct
  source 1..19: mol_type = other RNA
gaaatatctttattgtcag

SEQ ID NO: 4097 - RNA, 19 nt, synthetic construct
  source 1..19: mol_type = other RNA
ggaaatatctttattgtca

SEQ ID NO: 4098 - RNA, 19 nt, synthetic construct
  source 1..19: mol_type = other RNA
tggaaatatctttattgtc

SEQ ID NO: 4099 - RNA, 19 nt, synthetic construct
  source 1..19: mol_type = other RNA
ttggaaatatctttattgt

SEQ ID NO: 4100 - RNA, 19 nt, synthetic construct
  source 1..19: mol_type = other RNA
cttggaaatatctttattg

SEQ ID NO: 4101 - RNA, 19 nt, synthetic construct
  source 1..19: mol_type = other RNA
tcttggaaatatctttatt

SEQ ID NO: 4102 - RNA, 19 nt, synthetic construct
  source 1..19: mol_type = other RNA
ttcttggaaatatctttat

SEQ ID NO: 4103 - RNA, 21 nt, synthetic construct
  source 1..21: mol_type = other RNA
  modified_base 6: mod_base = OTHER; note = 2-fluoro-modified nucleoside
  modified_base 8: mod_base = OTHER; note = 2-fluoro-modified nucleoside
  modified_base 9: mod_base = OTHER; note = 2-fluoro-modified nucleoside
  modified_base 1: mod_base = OTHER; note = 2-O-methyl modified nucleoside
  modified_base 2: mod_base = OTHER; note = 2-O-methyl modified nucleoside
  modified_base 3: mod_base = OTHER; note = 2-O-methyl modified nucleoside
  modified_base 4: mod_base = OTHER; note = 2-O-methyl modified nucleoside
  modified_base 5: mod_base = OTHER; note = 2-O-methyl modified nucleoside
  modified_base 7: mod_base = OTHER; note = 2-O-methyl modified nucleoside
  modified_base 10: mod_base = OTHER; note = 2-O-methyl modified nucleoside
  modified_base 11: mod_base = OTHER; note = 2-O-methyl modified nucleoside
  modified_base 12: mod_base = OTHER; note = 2-O-methyl modified nucleoside
  modified_base 13: mod_base = OTHER; note = 2-O-methyl modified nucleoside
  modified_base 14: mod_base = OTHER; note = 2-O-methyl modified nucleoside
  modified_base 15: mod_base = OTHER; note = 2-O-methyl modified nucleoside
  modified_base 16: mod_base = OTHER; note = 2-O-methyl modified nucleoside
  modified_base 17: mod_base = OTHER; note = 2-O-methyl modified nucleoside
  modified_base 18: mod_base = OTHER; note = 2-O-methyl modified nucleoside
  modified_base 19: mod_base = OTHER; note = 2-O-methyl modified nucleoside
  modified_base 20: mod_base = OTHER; note = 2-O-methyl modified nucleoside
  modified_base 21: mod_base = OTHER; note = 2-O-methyl modified nucleoside
  modified_base 1^2: mod_base = OTHER; note = phosphorothioate linkage
  modified_base 2^3: mod_base = OTHER; note = phosphorothioate linkage
  modified_base 19^20: mod_base = OTHER; note = phosphorothioate linkage
  modified_base 20^21: mod_base = OTHER; note = phosphorothioate linkage
ggagtccccagaacctaaatt

SEQ ID NO: 4104 - RNA, 21 nt, synthetic construct
  source 1..21: mol_type = other RNA
  modified_base 6: mod_base = OTHER; note = 2-fluoro-modified nucleoside
  modified_base 7: mod_base = OTHER; note = 2-fluoro-modified nucleoside
  modified_base 9: mod_base = OTHER; note = 2-fluoro-modified nucleoside
  modified_base 1^2: mod_base = OTHER; note = phosphorothioate linkage
  modified_base 2^3: mod_base = OTHER; note = phosphorothioate linkage
  modified_base 19^20: mod_base = OTHER; note = phosphorothioate linkage
  modified_base 20^21: mod_base = OTHER; note = phosphorothioate linkage
  modified_base 1: mod_base = OTHER; note = 2-O-methyl modified nucleoside
  modified_base 2: mod_base = OTHER; note = 2-O-methyl modified nucleoside
  modified_base 3: mod_base = OTHER; note = 2-O-methyl modified nucleoside
  modified_base 4: mod_base = OTHER; note = 2-O-methyl modified nucleoside
  modified_base 5: mod_base = OTHER; note = 2-O-methyl modified nucleoside
  modified_base 8: mod_base = OTHER; note = 2-O-methyl modified nucleoside
  modified_base 10: mod_base = OTHER; note = 2-O-methyl modified nucleoside
  modified_base 11: mod_base = OTHER; note = 2-O-methyl modified nucleoside
  modified_base 12: mod_base = OTHER; note = 2-O-methyl modified nucleoside
  modified_base 13: mod_base = OTHER; note = 2-O-methyl modified nucleoside
  modified_base 14: mod_base = OTHER; note = 2-O-methyl modified nucleoside
  modified_base 15: mod_base = OTHER; note = 2-O-methyl modified nucleoside
  modified_base 16: mod_base = OTHER; note = 2-O-methyl modified nucleoside
  modified_base 17: mod_base = OTHER; note = 2-O-methyl modified nucleoside
  modified_base 18: mod_base = OTHER; note = 2-O-methyl modified nucleoside
  modified_base 19: mod_base = OTHER; note = 2-O-methyl modified nucleoside
  modified_base 20: mod_base = OTHER; note = 2-O-methyl modified nucleoside
  modified_base 21: mod_base = OTHER; note = 2-O-methyl modified nucleoside
ggagtccccagaacctaaatt

SEQ ID NO: 4105 - RNA, 21 nt, synthetic construct
  source 1..21: mol_type = other RNA
  modified_base 6: mod_base = OTHER; note = 2-fluoro-modified nucleoside
  modified_base 7: mod_base = OTHER; note = 2-fluoro-modified nucleoside
  modified_base 8: mod_base = OTHER; note = 2-fluoro-modified nucleoside
  modified_base 9: mod_base = OTHER; note = 2-fluoro-modified nucleoside
  modified_base 1^2: mod_base = OTHER; note = phosphorothioate linkage
  modified_base 2^3: mod_base = OTHER; note = phosphorothioate linkage
  modified_base 19^20: mod_base = OTHER; note = phosphorothioate linkage
  modified_base 20^21: mod_base = OTHER; note = phosphorothioate linkage
ggagtccccagaacctaaatt

SEQ ID NO: 4106 - RNA, 21 nt, synthetic construct
  source 1..21: mol_type = other RNA
  modified_base 8: mod_base = OTHER; note = 2-fluoro-modified nucleoside
  modified_base 9: mod_base = OTHER; note = 2-fluoro-modified nucleoside
  modified_base 1^2: mod_base = OTHER; note = phosphorothioate linkage
  modified_base 2^3: mod_base = OTHER; note = phosphorothioate linkage
  modified_base 19^20: mod_base = OTHER; note = phosphorothioate linkage
  modified_base 20^21: mod_base = OTHER; note = phosphorothioate linkage
  modified_base 5: mod_base = OTHER; note = 2-fluoro-modified nucleoside
ggagtccccagaacctaaatt

SEQ ID NO: 4107 - RNA, 21 nt, synthetic construct
  source 1..21: mol_type = other RNA
  modified_base 7: mod_base = OTHER; note = 2-fluoro-modified nucleoside
  modified_base 9: mod_base = OTHER; note = 2-fluoro-modified nucleoside
  modified_base 1^2: mod_base = OTHER; note = phosphorothioate linkage
  modified_base 2^3: mod_base = OTHER; note = phosphorothioate linkage
  modified_base 19^20: mod_base = OTHER; note = phosphorothioate linkage
  modified_base 20^21: mod_base = OTHER; note = phosphorothioate linkage
  modified_base 5: mod_base = OTHER; note = 2-fluoro-modified nucleoside
ggagtccccagaacctaaatt

SEQ ID NO: 4108 - RNA, 21 nt, synthetic construct
  source 1..21: mol_type = other RNA
  modified_base 6: mod_base = OTHER; note = 2-fluoro-modified nucleoside
  modified_base 9: mod_base = OTHER; note = 2-fluoro-modified nucleoside
  modified_base 1^2: mod_base = OTHER; note = phosphorothioate linkage
  modified_base 2^3: mod_base = OTHER; note = phosphorothioate linkage
  modified_base 19^20: mod_base = OTHER; note = phosphorothioate linkage
  modified_base 20^21: mod_base = OTHER; note = phosphorothioate linkage
  modified_base 5: mod_base = OTHER; note = 2-fluoro-modified nucleoside
ggagtccccagaacctaaatt

SEQ ID NO: 4109 - RNA, 21 nt, synthetic construct
  source 1..21: mol_type = other RNA
  modified_base 6: mod_base = OTHER; note = 2-fluoro-modified nucleoside
  modified_base 8: mod_base = OTHER; note = 2-fluoro-modified nucleoside
  modified_base 9: mod_base = OTHER; note = 2-fluoro-modified nucleoside
  modified_base 1^2: mod_base = OTHER; note = phosphorothioate linkage
  modified_base 2^3: mod_base = OTHER; note = phosphorothioate linkage
  modified_base 19^20: mod_base = OTHER; note = phosphorothioate linkage
  modified_base 20^21: mod_base = OTHER; note = phosphorothioate linkage
  modified_base 5: mod_base = OTHER; note = 2-fluoro-modified nucleoside
ggagtccccagaacctaaatt

SEQ ID NO: 4110 - RNA, 21 nt, synthetic construct
  source 1..21: mol_type = other RNA
  modified_base 6: mod_base = OTHER; note = 2-fluoro-modified nucleoside
  modified_base 7: mod_base = OTHER; note = 2-fluoro-modified nucleoside
  modified_base 8: mod_base = OTHER; note = 2-fluoro-modified nucleoside
  modified_base 9: mod_base = OTHER; note = 2-fluoro-modified nucleoside
  modified_base 1^2: mod_base = OTHER; note = phosphorothioate linkage
  modified_base 2^3: mod_base = OTHER; note = phosphorothioate linkage
  modified_base 19^20: mod_base = OTHER; note = phosphorothioate linkage
  modified_base 20^21: mod_base = OTHER; note = phosphorothioate linkage
  modified_base 5: mod_base = OTHER; note = 2-fluoro-modified nucleoside
ggagtccccagaacctaaatt

SEQ ID NO: 4111 - RNA, 21 nt, synthetic construct
  source 1..21: mol_type = other RNA
  modified_base 8: mod_base = OTHER; note = 2-fluoro-modified nucleoside
  modified_base 9: mod_base = OTHER; note = 2-fluoro-modified nucleoside
  modified_base 1^2: mod_base = OTHER; note = phosphorothioate linkage
  modified_base 2^3: mod_base = OTHER; note = phosphorothioate linkage
  modified_base 2^3: mod_base = OTHER; note = phosphorothioate linkage
  modified_base 20^21: mod_base = OTHER; note = phosphorothioate linkage
  modified_base 1: mod_base = OTHER; note = 2-O-methyl modified nucleoside
  modified_base 2: mod_base = OTHER; note = 2-O-methyl modified nucleoside
  modified_base 3: mod_base = OTHER; note = 2-O-methyl modified nucleoside
  modified_base 4: mod_base = OTHER; note = 2-O-methyl modified nucleoside
  modified_base 5: mod_base = OTHER; note = 2-O-methyl modified nucleoside
  modified_base 6: mod_base = OTHER; note = 2-O-methyl modified nucleoside
  modified_base 7: mod_base = OTHER; note = 2-O-methyl modified nucleoside
  modified_base 10: mod_base = OTHER; note = 2-O-methyl modified nucleoside
  modified_base 11: mod_base = OTHER; note = 2-O-methyl modified nucleoside
  modified_base 12: mod_base = OTHER; note = 2-O-methyl modified nucleoside
  modified_base 13: mod_base = OTHER; note = 2-O-methyl modified nucleoside
  modified_base 14: mod_base = OTHER; note = 2-O-methyl modified nucleoside
  modified_base 15: mod_base = OTHER; note = 2-O-methyl modified nucleoside
  modified_base 16: mod_base = OTHER; note = 2-O-methyl modified nucleoside
  modified_base 17: mod_base = OTHER; note = 2-O-methyl modified nucleoside
  modified_base 18: mod_base = OTHER; note = 2-O-methyl modified nucleoside
  modified_base 19: mod_base = OTHER; note = 2-O-methyl modified nucleoside
  modified_base 20: mod_base = OTHER; note = 2-O-methyl modified nucleoside
  modified_base 21: mod_base = OTHER; note = 2-O-methyl modified nucleoside
cccagaacctaatgccacatt

SEQ ID NO: 4112 - RNA, 21 nt, synthetic construct
  source 1..21: mol_type = other RNA
  modified_base 9: mod_base = OTHER; note = 2-fluoro-modified nucleoside
  modified_base 8: mod_base = OTHER; note = 2-fluoro-modified nucleoside
  modified_base 1^2: mod_base = OTHER; note = phosphorothioate linkage
  modified_base 2^3: mod_base = OTHER; note = phosphorothioate linkage
  modified_base 19^20: mod_base = OTHER; note = phosphorothioate linkage
  modified_base 20^21: mod_base = OTHER; note = phosphorothioate linkage
  modified_base 1: mod_base = OTHER; note = 2-O-methyl modified nucleoside
  modified_base 2: mod_base = OTHER; note = 2-O-methyl modified nucleoside
  modified_base 3: mod_base = OTHER; note = 2-O-methyl modified nucleoside
  modified_base 4: mod_base = OTHER; note = 2-O-methyl modified nucleoside
  modified_base 5: mod_base = OTHER; note = 2-O-methyl modified nucleoside
  modified_base 6: mod_base = OTHER; note = 2-O-methyl modified nucleoside
  modified_base 7: mod_base = OTHER; note = 2-O-methyl modified nucleoside
  modified_base 10: mod_base = OTHER; note = 2-O-methyl modified nucleoside
  modified_base 11: mod_base = OTHER; note = 2-O-methyl modified nucleoside
  modified_base 12: mod_base = OTHER; note = 2-O-methyl modified nucleoside
  modified_base 13: mod_base = OTHER; note = 2-O-methyl modified nucleoside
  modified_base 14: mod_base = OTHER; note = 2-O-methyl modified nucleoside
  modified_base 15: mod_base = OTHER; note = 2-O-methyl modified nucleoside
  modified_base 16: mod_base = OTHER; note = 2-O-methyl modified nucleoside
  modified_base 19: mod_base = OTHER; note = 2-O-methyl modified nucleoside
  modified_base 20: mod_base = OTHER; note = 2-O-methyl modified nucleoside
  modified_base 21: mod_base = OTHER; note = 2-O-methyl modified nucleoside
cccagaacctaatgccacatt

SEQ ID NO: 4113 - RNA, 21 nt, synthetic construct
  source 1..21: mol_type = other RNA
  modified_base 5: mod_base = OTHER; note = 2-O-methyl modified nucleoside
  modified_base 8: mod_base = OTHER; note = 2-fluoro-modified nucleoside
  modified_base 9: mod_base = OTHER; note = 2-fluoro-modified nucleoside
  modified_base 1^2: mod_base = OTHER; note = phosphorothioate linkage
  modified_base 2^3: mod_base = OTHER; note = phosphorothioate linkage
  modified_base 19^20: mod_base = OTHER; note = phosphorothioate linkage
  modified_base 20^21: mod_base = OTHER; note = phosphorothioate linkage
  modified_base 1: mod_base = OTHER; note = 2-O-methyl modified nucleoside
  modified_base 2: mod_base = OTHER; note = 2-O-methyl modified nucleoside
  modified_base 3: mod_base = OTHER; note = 2-O-methyl modified nucleoside
  modified_base 4: mod_base = OTHER; note = 2-O-methyl modified nucleoside
  modified_base 6: mod_base = OTHER; note = 2-fluoro-modified nucleoside
  modified_base 7: mod_base = OTHER; note = 2-O-methyl modified nucleoside
  modified_base 10: mod_base = OTHER; note = 2-O-methyl modified nucleoside
  modified_base 11: mod_base = OTHER; note = 2-O-methyl modified nucleoside
  modified_base 12: mod_base = OTHER; note = 2-O-methyl modified nucleoside
  modified_base 13: mod_base = OTHER; note = 2-O-methyl modified nucleoside
  modified_base 14: mod_base = OTHER; note = 2-O-methyl modified nucleoside
  modified_base 15: mod_base = OTHER; note = 2-O-methyl modified nucleoside
  modified_base 16: mod_base = OTHER; note = 2-O-methyl modified nucleoside
  modified_base 17: mod_base = OTHER; note = 2-O-methyl modified nucleoside
  modified_base 18: mod_base = OTHER; note = 2-O-methyl modified nucleoside
  modified_base 19: mod_base = OTHER; note = 2-O-methyl modified nucleoside
  modified_base 20: mod_base = OTHER; note = 2-O-methyl modified nucleoside
  modified_base 21: mod_base = OTHER; note = 2-O-methyl modified nucleoside
cactatcctggtgacctcatt

SEQ ID NO: 4114 - RNA, 21 nt, synthetic construct
  source 1..21: mol_type = other RNA
  modified_base 6: mod_base = OTHER; note = 2-fluoro-modified nucleoside
  modified_base 7: mod_base = OTHER; note = 2-fluoro-modified nucleoside
  modified_base 9: mod_base = OTHER; note = 2-fluoro-modified nucleoside
  modified_base 1^2: mod_base = OTHER; note = phosphorothioate linkage
  modified_base 2^3: mod_base = OTHER; note = phosphorothioate linkage
  modified_base 19^20: mod_base = OTHER; note = phosphorothioate linkage
  modified_base 20^21: mod_base = OTHER; note = phosphorothioate linkage
  modified_base 1: mod_base = OTHER; note = 2-O-methyl modified nucleoside
  modified_base 2: mod_base = OTHER; note = 2-O-methyl modified nucleoside
  modified_base 3: mod_base = OTHER; note = 2-O-methyl modified nucleoside
  modified_base 4: mod_base = OTHER; note = 2-O-methyl modified nucleoside
  modified_base 5: mod_base = OTHER; note = 2-O-methyl modified nucleoside
  modified_base 7: mod_base = OTHER; note = 2-O-methyl modified nucleoside
  modified_base 9: mod_base = OTHER; note = 2-O-methyl modified nucleoside
  modified_base 10: mod_base = OTHER; note = 2-O-methyl modified nucleoside
  modified_base 11: mod_base = OTHER; note = 2-O-methyl modified nucleoside
  modified_base 12: mod_base = OTHER; note = 2-O-methyl modified nucleoside
  modified_base 13: mod_base = OTHER; note = 2-O-methyl modified nucleoside
  modified_base 14: mod_base = OTHER; note = 2-O-methyl modified nucleoside
  modified_base 15: mod_base = OTHER; note = 2-O-methyl modified nucleoside
  modified_base 16: mod_base = OTHER; note = 2-O-methyl modified nucleoside
  modified_base 17: mod_base = OTHER; note = 2-O-methyl modified nucleoside
  modified_base 18: mod_base = OTHER; note = 2-O-methyl modified nucleoside
  modified_base 19: mod_base = OTHER; note = 2-O-methyl modified nucleoside
  modified_base 20: mod_base = OTHER; note = 2-O-methyl modified nucleoside
  modified_base 21: mod_base = OTHER; note = 2-O-methyl modified nucleoside
cactatcctggtgacctcatt

SEQ ID NO: 4115 - RNA, 21 nt, synthetic construct
  source 1..21: mol_type = other RNA
  modified_base 6: mod_base = OTHER; note = 2-fluoro-modified nucleoside
  modified_base 7: mod_base = OTHER; note = 2-fluoro-modified nucleoside
  modified_base 8: mod_base = OTHER; note = 2-fluoro-modified nucleoside
  modified_base 9: mod_base = OTHER; note = 2-fluoro-modified nucleoside
  modified_base 1^2: mod_base = OTHER; note = phosphorothioate linkage
  modified_base 2^3: mod_base = OTHER; note = phosphorothioate linkage
  modified_base 19^20: mod_base = OTHER; note = phosphorothioate linkage
  modified_base 20^21: mod_base = OTHER; note = phosphorothioate linkage
  modified_base 1: mod_base = OTHER; note = 2-O-methyl modified nucleoside
  modified_base 2: mod_base = OTHER; note = 2-O-methyl modified nucleoside
  modified_base 3: mod_base = OTHER; note = 2-O-methyl modified nucleoside
  modified_base 4: mod_base = OTHER; note = 2-O-methyl modified nucleoside
  modified_base 5: mod_base = OTHER; note = 2-O-methyl modified nucleoside
  modified_base 10: mod_base = OTHER; note = 2-O-methyl modified nucleoside
  modified_base 11: mod_base = OTHER; note = 2-O-methyl modified nucleoside
  modified_base 12: mod_base = OTHER; note = 2-O-methyl modified nucleoside
  modified_base 13: mod_base = OTHER; note = 2-O-methyl modified nucleoside
  modified_base 14: mod_base = OTHER; note = 2-O-methyl modified nucleoside
  modified_base 15: mod_base = OTHER; note = 2-O-methyl modified nucleoside
  modified_base 16: mod_base = OTHER; note = 2-O-methyl modified nucleoside
  modified_base 17: mod_base = OTHER; note = 2-O-methyl modified nucleoside
  modified_base 18: mod_base = OTHER; note = 2-O-methyl modified nucleoside
  modified_base 19: mod_base = OTHER; note = 2-O-methyl modified nucleoside
  modified_base 20: mod_base = OTHER; note = 2-O-methyl modified nucleoside
  modified_base 21: mod_base = OTHER; note = 2-O-methyl modified nucleoside
cactatcctggtgacctcatt

SEQ ID NO: 4116 - RNA, 21 nt, synthetic construct
  source 1..21: mol_type = other RNA
  modified_base 9: mod_base = OTHER; note = 2-fluoro-modified nucleoside
  modified_base 10: mod_base = OTHER; note = 2-fluoro-modified nucleoside
  modified_base 1^2: mod_base = OTHER; note = phosphorothioate linkage
  modified_base 2^3: mod_base = OTHER; note = phosphorothioate linkage
  modified_base 19^20: mod_base = OTHER; note = phosphorothioate linkage
  modified_base 20^21: mod_base = OTHER; note = phosphorothioate linkage
  modified_base 1: mod_base = OTHER; note = 2-O-methyl modified nucleoside
  modified_base 2: mod_base = OTHER; note = 2-O-methyl modified nucleoside
  modified_base 3: mod_base = OTHER; note = 2-O-methyl modified nucleoside
  modified_base 4: mod_base = OTHER; note = 2-O-methyl modified nucleoside
  modified_base 5: mod_base = OTHER; note = 2-O-methyl modified nucleoside
  modified_base 6: mod_base = OTHER; note = 2-O-methyl modified nucleoside
  modified_base 7: mod_base = OTHER; note = 2-O-methyl modified nucleoside
  modified_base 8: mod_base = OTHER; note = 2-O-methyl modified nucleoside
  modified_base 11: mod_base = OTHER; note = 2-O-methyl modified nucleoside
  modified_base 12: mod_base = OTHER; note = 2-O-methyl modified nucleoside
  modified_base 13: mod_base = OTHER; note = 2-O-methyl modified nucleoside
  modified_base 14: mod_base = OTHER; note = 2-O-methyl modified nucleoside
  modified_base 15: mod_base = OTHER; note = 2-O-methyl modified nucleoside
  modified_base 16: mod_base = OTHER; note = 2-O-methyl modified nucleoside
  modified_base 17: mod_base = OTHER; note = 2-O-methyl modified nucleoside
  modified_base 18: mod_base = OTHER; note = 2-O-methyl modified nucleoside
  modified_base 19: mod_base = OTHER; note = 2-O-methyl modified nucleoside
  modified_base 20: mod_base = OTHER; note = 2-O-methyl modified nucleoside
  modified_base 21: mod_base = OTHER; note = 2-O-methyl modified nucleoside
actatcctggtgacctctatt

SEQ ID NO: 4117 - RNA, 21 nt, synthetic construct
  source 1..21: mol_type = other RNA
  modified_base 7: mod_base = OTHER; note = 2-fluoro-modified nucleoside
  modified_base 9: mod_base = OTHER; note = 2-fluoro-modified nucleoside
  modified_base 10: mod_base = OTHER; note = 2-fluoro-modified nucleoside
  modified_base 1^2: mod_base = OTHER; note = phosphorothioate linkage
  modified_base 2^3: mod_base = OTHER; note = phosphorothioate linkage
  modified_base 19^20: mod_base = OTHER; note = phosphorothioate linkage
  modified_base 20^21: mod_base = OTHER; note = phosphorothioate linkage
  modified_base 1: mod_base = OTHER; note = 2-O-methyl modified nucleoside
  modified_base 2: mod_base = OTHER; note = 2-O-methyl modified nucleoside
  modified_base 3: mod_base = OTHER; note = 2-O-methyl modified nucleoside
  modified_base 4: mod_base = OTHER; note = 2-O-methyl modified nucleoside
  modified_base 5: mod_base = OTHER; note = 2-O-methyl modified nucleoside
  modified_base 6: mod_base = OTHER; note = 2-O-methyl modified nucleoside
  modified_base 8: mod_base = OTHER; note = 2-O-methyl modified nucleoside
  modified_base 11: mod_base = OTHER; note = 2-O-methyl modified nucleoside
  modified_base 12: mod_base = OTHER; note = 2-O-methyl modified nucleoside
  modified_base 13: mod_base = OTHER; note = 2-O-methyl modified nucleoside
  modified_base 14: mod_base = OTHER; note = 2-O-methyl modified nucleoside
  modified_base 15: mod_base = OTHER; note = 2-O-methyl modified nucleoside
  modified_base 16: mod_base = OTHER; note = 2-O-methyl modified nucleoside
  modified_base 17: mod_base = OTHER; note = 2-O-methyl modified nucleoside
  modified_base 18: mod_base = OTHER; note = 2-O-methyl modified nucleoside
  modified_base 19: mod_base = OTHER; note = 2-O-methyl modified nucleoside
  modified_base 20: mod_base = OTHER; note = 2-O-methyl modified nucleoside
  modified_base 21: mod_base = OTHER; note = 2-O-methyl modified nucleoside
tgtgccacaactcacaacatt

SEQ ID NO: 4118 - RNA, 21 nt, synthetic construct
  source 1..21: mol_type = other RNA
  modified_base 5: mod_base = OTHER; note = 2-fluoro-modified nucleoside
  modified_base 9: mod_base = OTHER; note = 2-fluoro-modified nucleoside
  modified_base 10: mod_base = OTHER; note = 2-fluoro-modified nucleoside
  modified_base 1^2: mod_base = OTHER; note = phosphorothioate linkage
  modified_base 2^3: mod_base = OTHER; note = phosphorothioate linkage
  modified_base 19^20: mod_base = OTHER; note = phosphorothioate linkage
  modified_base 20^21: mod_base = OTHER; note = phosphorothioate linkage
  modified_base 1: mod_base = OTHER; note = 2-O-methyl modified nucleoside
  modified_base 2: mod_base = OTHER; note = 2-O-methyl modified nucleoside
  modified_base 3: mod_base = OTHER; note = 2-O-methyl modified nucleoside
  modified_base 4: mod_base = OTHER; note = 2-O-methyl modified nucleoside
  modified_base 6: mod_base = OTHER; note = 2-O-methyl modified nucleoside
  modified_base 7: mod_base = OTHER; note = 2-O-methyl modified nucleoside
  modified_base 8: mod_base = OTHER; note = 2-O-methyl modified nucleoside
  modified_base 11: mod_base = OTHER; note = 2-O-methyl modified nucleoside
  modified_base 12: mod_base = OTHER; note = 2-O-methyl modified nucleoside
  modified_base 13: mod_base = OTHER; note = 2-O-methyl modified nucleoside
  modified_base 14: mod_base = OTHER; note = 2-O-methyl modified nucleoside
  modified_base 15: mod_base = OTHER; note = 2-O-methyl modified nucleoside
  modified_base 16: mod_base = OTHER; note = 2-O-methyl modified nucleoside
  modified_base 17: mod_base = OTHER; note = 2-O-methyl modified nucleoside
  modified_base 18: mod_base = OTHER; note = 2-O-methyl modified nucleoside
  modified_base 19: mod_base = OTHER; note = 2-O-methyl modified nucleoside
  modified_base 20: mod_base = OTHER; note = 2-O-methyl modified nucleoside
  modified_base 21: mod_base = OTHER; note = 2-O-methyl modified nucleoside
gccacaactcacaactacatt

SEQ ID NO: 4119 - RNA, 21 nt, synthetic construct
  source 1..21: mol_type = other RNA
  modified_base 5: mod_base = OTHER; note = 2-fluoro-modified nucleoside
  modified_base 8: mod_base = OTHER; note = 2-fluoro-modified nucleoside
  modified_base 9: mod_base = OTHER; note = 2-fluoro-modified nucleoside
  modified_base 1^2: mod_base = OTHER; note = phosphorothioate linkage
  modified_base 2^3: mod_base = OTHER; note = phosphorothioate linkage
  modified_base 19^20: mod_base = OTHER; note = phosphorothioate linkage
  modified_base 20^21: mod_base = OTHER; note = phosphorothioate linkage
  modified_base 1: mod_base = OTHER; note = 2-O-methyl modified nucleoside
  modified_base 2: mod_base = OTHER; note = 2-O-methyl modified nucleoside
  modified_base 3: mod_base = OTHER; note = 2-O-methyl modified nucleoside
  modified_base 4: mod_base = OTHER; note = 2-O-methyl modified nucleoside
  modified_base 6: mod_base = OTHER; note = 2-O-methyl modified nucleoside
  modified_base 7: mod_base = OTHER; note = 2-O-methyl modified nucleoside
  modified_base 10: mod_base = OTHER; note = 2-O-methyl modified nucleoside
  modified_base 11: mod_base = OTHER; note = 2-O-methyl modified nucleoside
  modified_base 12: mod_base = OTHER; note = 2-O-methyl modified nucleoside
  modified_base 13: mod_base = OTHER; note = 2-O-methyl modified nucleoside
  modified_base 14: mod_base = OTHER; note = 2-O-methyl modified nucleoside
  modified_base 15: mod_base = OTHER; note = 2-O-methyl modified nucleoside
  modified_base 16: mod_base = OTHER; note = 2-O-methyl modified nucleoside
  modified_base 17: mod_base = OTHER; note = 2-O-methyl modified nucleoside
  modified_base 18: mod_base = OTHER; note = 2-O-methyl modified nucleoside
  modified_base 19: mod_base = OTHER; note = 2-O-methyl modified nucleoside
  modified_base 20: mod_base = OTHER; note = 2-O-methyl modified nucleoside
  modified_base 21: mod_base = OTHER; note = 2-O-methyl modified nucleoside
gccacaactcacaactacatt

SEQ ID NO: 4120 - RNA, 21 nt, synthetic construct
  source 1..21: mol_type = other RNA
  modified_base 5: mod_base = OTHER; note = 2-fluoro-modified nucleoside
  modified_base 9: mod_base = OTHER; note = 2-fluoro-modified nucleoside
  modified_base 11: mod_base = OTHER; note = 2-fluoro-modified nucleoside
  modified_base 1^2: mod_base = OTHER; note = phosphorothioate linkage
  modified_base 2^3: mod_base = OTHER; note = phosphorothioate linkage
  modified_base 19^20: mod_base = OTHER; note = phosphorothioate linkage
  modified_base 20^21: mod_base = OTHER; note = phosphorothioate linkage
  modified_base 1: mod_base = OTHER; note = 2-O-methyl modified nucleoside
  modified_base 2: mod_base = OTHER; note = 2-O-methyl modified nucleoside
  modified_base 3: mod_base = OTHER; note = 2-O-methyl modified nucleoside
  modified_base 4: mod_base = OTHER; note = 2-O-methyl modified nucleoside
  modified_base 6: mod_base = OTHER; note = 2-O-methyl modified nucleoside
  modified_base 7: mod_base = OTHER; note = 2-O-methyl modified nucleoside
  modified_base 8: mod_base = OTHER; note = 2-O-methyl modified nucleoside
  modified_base 10: mod_base = OTHER; note = 2-O-methyl modified nucleoside
  modified_base 12: mod_base = OTHER; note = 2-O-methyl modified nucleoside
  modified_base 13: mod_base = OTHER; note = 2-O-methyl modified nucleoside
  modified_base 14: mod_base = OTHER; note = 2-O-methyl modified nucleoside
  modified_base 15: mod_base = OTHER; note = 2-O-methyl modified nucleoside
  modified_base 16: mod_base = OTHER; note = 2-O-methyl modified nucleoside
  modified_base 17: mod_base = OTHER; note = 2-O-methyl modified nucleoside
  modified_base 18: mod_base = OTHER; note = 2-O-methyl modified nucleoside
  modified_base 19: mod_base = OTHER; note = 2-O-methyl modified nucleoside
  modified_base 20: mod_base = OTHER; note = 2-O-methyl modified nucleoside
  modified_base 21: mod_base = OTHER; note = 2-O-methyl modified nucleoside
cacaactcacaactacgaatt

SEQ ID NO: 4121 - RNA, 21 nt, synthetic construct
  source 1..21: mol_type = other RNA
  modified_base 6: mod_base = OTHER; note = 2-fluoro-modified nucleoside
  modified_base 7: mod_base = OTHER; note = 2-fluoro-modified nucleoside
  modified_base 10: mod_base = OTHER; note = 2-fluoro-modified nucleoside
  modified_base 1^2: mod_base = OTHER; note = phosphorothioate linkage
  modified_base 2^3: mod_base = OTHER; note = phosphorothioate linkage
  modified_base 19^20: mod_base = OTHER; note = phosphorothioate linkage
  modified_base 20^21: mod_base = OTHER; note = phosphorothioate linkage
  modified_base 1: mod_base = OTHER; note = 2-O-methyl modified nucleoside
  modified_base 2: mod_base = OTHER; note = 2-O-methyl modified nucleoside
  modified_base 3: mod_base = OTHER; note = 2-O-methyl modified nucleoside
  modified_base 4: mod_base = OTHER; note = 2-O-methyl modified nucleoside
  modified_base 5: mod_base = OTHER; note = 2-O-methyl modified nucleoside
  modified_base 8: mod_base = OTHER; note = 2-O-methyl modified nucleoside
  modified_base 10: mod_base = OTHER; note = 2-O-methyl modified nucleoside
  modified_base 11: mod_base = OTHER; note = 2-O-methyl modified nucleoside
  modified_base 12: mod_base = OTHER; note = 2-O-methyl modified nucleoside
  modified_base 13: mod_base = OTHER; note = 2-O-methyl modified nucleoside
  modified_base 14: mod_base = OTHER; note = 2-O-methyl modified nucleoside
  modified_base 15: mod_base = OTHER; note = 2-O-methyl modified nucleoside
  modified_base 16: mod_base = OTHER; note = 2-O-methyl modified nucleoside
  modified_base 17: mod_base = OTHER; note = 2-O-methyl modified nucleoside
  modified_base 18: mod_base = OTHER; note = 2-O-methyl modified nucleoside
  modified_base 19: mod_base = OTHER; note = 2-O-methyl modified nucleoside
  modified_base 20: mod_base = OTHER; note = 2-O-methyl modified nucleoside
  modified_base 21: mod_base = OTHER; note = 2-O-methyl modified nucleoside
acaactcacaactacgacatt

SEQ ID NO: 4122 - RNA, 21 nt, synthetic construct
  source 1..21: mol_type = other RNA
  modified_base 5: mod_base = OTHER; note = 2-fluoro-modified nucleoside
  modified_base 7: mod_base = OTHER; note = 2-fluoro-modified nucleoside
  modified_base 9: mod_base = OTHER; note = 2-fluoro-modified nucleoside
  modified_base 1^2: mod_base = OTHER; note = phosphorothioate linkage
  modified_base 2^3: mod_base = OTHER; note = phosphorothioate linkage
  modified_base 19^20: mod_base = OTHER; note = phosphorothioate linkage
  modified_base 20^21: mod_base = OTHER; note = phosphorothioate linkage
  modified_base 1: mod_base = OTHER; note = 2-O-methyl modified nucleoside
  modified_base 2: mod_base = OTHER; note = 2-O-methyl modified nucleoside
  modified_base 3: mod_base = OTHER; note = 2-O-methyl modified nucleoside
  modified_base 4: mod_base = OTHER; note = 2-O-methyl modified nucleoside
  modified_base 6: mod_base = OTHER; note = 2-O-methyl modified nucleoside
  modified_base 8: mod_base = OTHER; note = 2-O-methyl modified nucleoside
  modified_base 10: mod_base = OTHER; note = 2-O-methyl modified nucleoside
  modified_base 11: mod_base = OTHER; note = 2-O-methyl modified nucleoside
  modified_base 12: mod_base = OTHER; note = 2-O-methyl modified nucleoside
  modified_base 13: mod_base = OTHER; note = 2-O-methyl modified nucleoside
  modified_base 14: mod_base = OTHER; note = 2-O-methyl modified nucleoside
  modified_base 15: mod_base = OTHER; note = 2-O-methyl modified nucleoside
  modified_base 16: mod_base = OTHER; note = 2-O-methyl modified nucleoside
  modified_base 17: mod_base = OTHER; note = 2-O-methyl modified nucleoside
  modified_base 18: mod_base = OTHER; note = 2-O-methyl modified nucleoside
  modified_base 19: mod_base = OTHER; note = 2-O-methyl modified nucleoside
  modified_base 20: mod_base = OTHER; note = 2-O-methyl modified nucleoside
  modified_base 21: mod_base = OTHER; note = 2-O-methyl modified nucleoside
acaactcacaactacgacatt

SEQ ID NO: 4123 - RNA, 21 nt, synthetic construct
  source 1..21: mol_type = other RNA
  modified_base 5: mod_base = OTHER; note = 2-fluoro-modified nucleoside
  modified_base 6: mod_base = OTHER; note = 2-fluoro-modified nucleoside
  modified_base 9: mod_base = OTHER; note = 2-fluoro-modified nucleoside
  modified_base 1^2: mod_base = OTHER; note = phosphorothioate linkage
  modified_base 2^3: mod_base = OTHER; note = phosphorothioate linkage
  modified_base 19^20: mod_base = OTHER; note = phosphorothioate linkage
  modified_base 20^21: mod_base = OTHER; note = phosphorothioate linkage
  modified_base 1: mod_base = OTHER; note = 2-O-methyl modified nucleoside
  modified_base 2: mod_base = OTHER; note = 2-O-methyl modified nucleoside
  modified_base 3: mod_base = OTHER; note = 2-O-methyl modified nucleoside
  modified_base 4: mod_base = OTHER; note = 2-O-methyl modified nucleoside
  modified_base 7: mod_base = OTHER; note = 2-O-methyl modified nucleoside
  modified_base 8: mod_base = OTHER; note = 2-O-methyl modified nucleoside
  modified_base 10: mod_base = OTHER; note = 2-O-methyl modified nucleoside
  modified_base 11: mod_base = OTHER; note = 2-O-methyl modified nucleoside
  modified_base 12: mod_base = OTHER; note = 2-O-methyl modified nucleoside
  modified_base 13: mod_base = OTHER; note = 2-O-methyl modified nucleoside
  modified_base 14: mod_base = OTHER; note = 2-O-methyl modified nucleoside
  modified_base 15: mod_base = OTHER; note = 2-O-methyl modified nucleoside
  modified_base 16: mod_base = OTHER; note = 2-O-methyl modified nucleoside
  modified_base 17: mod_base = OTHER; note = 2-O-methyl modified nucleoside
  modified_base 18: mod_base = OTHER; note = 2-O-methyl modified nucleoside
  modified_base 19: mod_base = OTHER; note = 2-O-methyl modified nucleoside
  modified_base 20: mod_base = OTHER; note = 2-O-methyl modified nucleoside
  modified_base 21: mod_base = OTHER; note = 2-O-methyl modified nucleoside
acaactcacaactacgacatt

SEQ ID NO: 4124 - RNA, 21 nt, synthetic construct
  source 1..21: mol_type = other RNA
  modified_base 7: mod_base = OTHER; note = 2-fluoro-modified nucleoside
  modified_base 9: mod_base = OTHER; note = 2-fluoro-modified nucleoside
  modified_base 10: mod_base = OTHER; note = 2-fluoro-modified nucleoside
  modified_base 1^2: mod_base = OTHER; note = phosphorothioate linkage
  modified_base 2^3: mod_base = OTHER; note = phosphorothioate linkage
  modified_base 19^20: mod_base = OTHER; note = phosphorothioate linkage
  modified_base 20^21: mod_base = OTHER; note = phosphorothioate linkage
  modified_base 1: mod_base = OTHER; note = 2-O-methyl modified nucleoside
  modified_base 2: mod_base = OTHER; note = 2-O-methyl modified nucleoside
  modified_base 3: mod_base = OTHER; note = 2-O-methyl modified nucleoside
  modified_base 4: mod_base = OTHER; note = 2-O-methyl modified nucleoside
  modified_base 5: mod_base = OTHER; note = 2-O-methyl modified nucleoside
  modified_base 6: mod_base = OTHER; note = 2-O-methyl modified nucleoside
  modified_base 7: mod_base = OTHER; note = 2-O-methyl modified nucleoside
  modified_base 8: mod_base = OTHER; note = 2-O-methyl modified nucleoside
  modified_base 11: mod_base = OTHER; note = 2-O-methyl modified nucleoside
  modified_base 12: mod_base = OTHER; note = 2-O-methyl modified nucleoside
  modified_base 13: mod_base = OTHER; note = 2-O-methyl modified nucleoside
  modified_base 14: mod_base = OTHER; note = 2-O-methyl modified nucleoside
  modified_base 15: mod_base = OTHER; note = 2-O-methyl modified nucleoside
  modified_base 16: mod_base = OTHER; note = 2-O-methyl modified nucleoside
  modified_base 17: mod_base = OTHER; note = 2-O-methyl modified nucleoside
  modified_base 18: mod_base = OTHER; note = 2-O-methyl modified nucleoside
  modified_base 19: mod_base = OTHER; note = 2-O-methyl modified nucleoside
  modified_base 20: mod_base = OTHER; note = 2-O-methyl modified nucleoside
  modified_base 21: mod_base = OTHER; note = 2-O-methyl modified nucleoside
caactcacaactacgaccatt

SEQ ID NO: 4125 - RNA, 21 nt, synthetic construct
  source 1..21: mol_type = other RNA
  modified_base 7: mod_base = OTHER; note = 2-fluoro-modified nucleoside
  modified_base 9: mod_base = OTHER; note = 2-fluoro-modified nucleoside
  modified_base 11: mod_base = OTHER; note = 2-fluoro-modified nucleoside
  modified_base 1^2: mod_base = OTHER; note = phosphorothioate linkage
  modified_base 2^3: mod_base = OTHER; note = phosphorothioate linkage
  modified_base 19^20: mod_base = OTHER; note = phosphorothioate linkage
  modified_base 20^21: mod_base = OTHER; note = phosphorothioate linkage
  modified_base 1: mod_base = OTHER; note = 2-O-methyl modified nucleoside
  modified_base 2: mod_base = OTHER; note = 2-O-methyl modified nucleoside
  modified_base 3: mod_base = OTHER; note = 2-O-methyl modified nucleoside
  modified_base 4: mod_base = OTHER; note = 2-O-methyl modified nucleoside
  modified_base 5: mod_base = OTHER; note = 2-O-methyl modified nucleoside
  modified_base 6: mod_base = OTHER; note = 2-O-methyl modified nucleoside
  modified_base 8: mod_base = OTHER; note = 2-O-methyl modified nucleoside
  modified_base 10: mod_base = OTHER; note = 2-O-methyl modified nucleoside
  modified_base 12: mod_base = OTHER; note = 2-O-methyl modified nucleoside
  modified_base 13: mod_base = OTHER; note = 2-O-methyl modified nucleoside
  modified_base 14: mod_base = OTHER; note = 2-O-methyl modified nucleoside
  modified_base 15: mod_base = OTHER; note = 2-O-methyl modified nucleoside
  modified_base 16: mod_base = OTHER; note = 2-O-methyl modified nucleoside
  modified_base 17: mod_base = OTHER; note = 2-O-methyl modified nucleoside
  modified_base 18: mod_base = OTHER; note = 2-O-methyl modified nucleoside
  modified_base 19: mod_base = OTHER; note = 2-O-methyl modified nucleoside
  modified_base 20: mod_base = OTHER; note = 2-O-methyl modified nucleoside
  modified_base 21: mod_base = OTHER; note = 2-O-methyl modified nucleoside
cacccgacatacagcttgatt

SEQ ID NO: 4126 - RNA, 21 nt, synthetic construct
  source 1..21: mol_type = other RNA
  modified_base 6: mod_base = OTHER; note = phosphorothioate linkage
  modified_base 9: mod_base = OTHER; note = phosphorothioate linkage
  modified_base 11: mod_base = OTHER; note = phosphorothioate linkage
  modified_base 1^2: mod_base = OTHER; note = phosphorothioate linkage
  modified_base 2^3: mod_base = OTHER; note = phosphorothioate linkage
  modified_base 19^20: mod_base = OTHER; note = phosphorothioate linkage
  modified_base 20^21: mod_base = OTHER; note = phosphorothioate linkage
  modified_base 1: mod_base = OTHER; note = 2-O-methyl modified nucleoside
  modified_base 2: mod_base = OTHER; note = 2-O-methyl modified nucleoside
  modified_base 3: mod_base = OTHER; note = 2-O-methyl modified nucleoside
  modified_base 4: mod_base = OTHER; note = 2-O-methyl modified nucleoside
  modified_base 5: mod_base = OTHER; note = 2-O-methyl modified nucleoside
  modified_base 7: mod_base = OTHER; note = 2-O-methyl modified nucleoside
  modified_base 8: mod_base = OTHER; note = 2-O-methyl modified nucleoside
  modified_base 10: mod_base = OTHER; note = 2-O-methyl modified nucleoside
  modified_base 12: mod_base = OTHER; note = 2-O-methyl modified nucleoside
  modified_base 13: mod_base = OTHER; note = 2-O-methyl modified nucleoside
  modified_base 14: mod_base = OTHER; note = 2-O-methyl modified nucleoside
  modified_base 15: mod_base = OTHER; note = 2-O-methyl modified nucleoside
  modified_base 16: mod_base = OTHER; note = 2-O-methyl modified nucleoside
  modified_base 17: mod_base = OTHER; note = 2-O-methyl modified nucleoside
  modified_base 18: mod_base = OTHER; note = 2-O-methyl modified nucleoside
  modified_base 19: mod_base = OTHER; note = 2-O-methyl modified nucleoside
  modified_base 20: mod_base = OTHER; note = 2-O-methyl modified nucleoside
  modified_base 21: mod_base = OTHER; note = 2-O-methyl modified nucleoside
cacccgacatacagcttgatt

SEQ ID NO: 4127 - RNA, 21 nt, synthetic construct
  source 1..21: mol_type = other RNA
  modified_base 6: mod_base = OTHER; note = 2-fluoro-modified nucleoside
  modified_base 7: mod_base = OTHER; note = 2-fluoro-modified nucleoside
  modified_base 9: mod_base = OTHER; note = 2-fluoro-modified nucleoside
  modified_base 1^2: mod_base = OTHER; note = phosphorothioate linkage
  modified_base 2^3: mod_base = OTHER; note = phosphorothioate linkage
  modified_base 19^20: mod_base = OTHER; note = phosphorothioate linkage
  modified_base 20^21: mod_base = OTHER; note = phosphorothioate linkage
  modified_base 1: mod_base = OTHER; note = 2-O-methyl modified nucleoside
  modified_base 2: mod_base = OTHER; note = 2-O-methyl modified nucleoside
  modified_base 3: mod_base = OTHER; note = 2-O-methyl modified nucleoside
  modified_base 4: mod_base = OTHER; note = 2-O-methyl modified nucleoside
  modified_base 5: mod_base = OTHER; note = 2-O-methyl modified nucleoside
  modified_base 8: mod_base = OTHER; note = 2-O-methyl modified nucleoside
  modified_base 10: mod_base = OTHER; note = 2-O-methyl modified nucleoside
  modified_base 11: mod_base = OTHER; note = 2-O-methyl modified nucleoside
  modified_base 12: mod_base = OTHER; note = 2-O-methyl modified nucleoside
  modified_base 13: mod_base = OTHER; note = 2-O-methyl modified nucleoside
  modified_base 14: mod_base = OTHER; note = 2-O-methyl modified nucleoside
  modified_base 15: mod_base = OTHER; note = 2-O-methyl modified nucleoside
  modified_base 16: mod_base = OTHER; note = 2-O-methyl modified nucleoside
  modified_base 17: mod_base = OTHER; note = 2-O-methyl modified nucleoside
  modified_base 18: mod_base = OTHER; note = 2-O-methyl modified nucleoside
  modified_base 19: mod_base = OTHER; note = 2-O-methyl modified nucleoside
  modified_base 20: mod_base = OTHER; note = 2-O-methyl modified nucleoside
  modified_base 21: mod_base = OTHER; note = 2-O-methyl modified nucleoside
cacccgacatacagcttgatt

SEQ ID NO: 4128 - RNA, 21 nt, synthetic construct
  source 1..21: mol_type = other RNA
  modified_base 6: mod_base = OTHER; note = 2-fluoro-modified nucleoside
  modified_base 7: mod_base = OTHER; note = 2-fluoro-modified nucleoside
  modified_base 9: mod_base = OTHER; note = 2-fluoro-modified nucleoside
  modified_base 11: mod_base = OTHER; note = 2-fluoro-modified nucleoside
  modified_base 1^2: mod_base = OTHER; note = phosphorothioate linkage
  modified_base 2^3: mod_base = OTHER; note = phosphorothioate linkage
  modified_base 19^20: mod_base = OTHER; note = phosphorothioate linkage
  modified_base 20^21: mod_base = OTHER; note = phosphorothioate linkage
  modified_base 1: mod_base = OTHER; note = 2-O-methyl modified nucleoside
  modified_base 2: mod_base = OTHER; note = 2-O-methyl modified nucleoside
  modified_base 3: mod_base = OTHER; note = 2-O-methyl modified nucleoside
  modified_base 4: mod_base = OTHER; note = 2-O-methyl modified nucleoside
  modified_base 5: mod_base = OTHER; note = 2-O-methyl modified nucleoside
  modified_base 8: mod_base = OTHER; note = 2-O-methyl modified nucleoside
  modified_base 10: mod_base = OTHER; note = 2-O-methyl modified nucleoside
  modified_base 11: mod_base = OTHER; note = 2-O-methyl modified nucleoside
  modified_base 12: mod_base = OTHER; note = 2-O-methyl modified nucleoside
  modified_base 13: mod_base = OTHER; note = 2-O-methyl modified nucleoside
  modified_base 14: mod_base = OTHER; note = 2-O-methyl modified nucleoside
  modified_base 15: mod_base = OTHER; note = 2-O-methyl modified nucleoside
  modified_base 16: mod_base = OTHER; note = 2-O-methyl modified nucleoside
  modified_base 17: mod_base = OTHER; note = 2-O-methyl modified nucleoside
  modified_base 18: mod_base = OTHER; note = 2-O-methyl modified nucleoside
  modified_base 19: mod_base = OTHER; note = 2-O-methyl modified nucleoside
  modified_base 20: mod_base = OTHER; note = 2-O-methyl modified nucleoside
  modified_base 21: mod_base = OTHER; note = 2-O-methyl modified nucleoside
cacccgacatacagcttgatt

SEQ ID NO: 4129 - RNA, 21 nt, synthetic construct
  source 1..21: mol_type = other RNA
  modified_base 5: mod_base = OTHER; note = 2-fluoro-modified nucleoside
  modified_base 9: mod_base = OTHER; note = 2-fluoro-modified nucleoside
  modified_base 11: mod_base = OTHER; note = 2-fluoro-modified nucleoside
  modified_base 1^2: mod_base = OTHER; note = phosphorothioate linkage
  modified_base 2^3: mod_base = OTHER; note = phosphorothioate linkage
  modified_base 19^20: mod_base = OTHER; note = phosphorothioate linkage
  modified_base 20^21: mod_base = OTHER; note = phosphorothioate linkage
  modified_base 1: mod_base = OTHER; note = 2-O-methyl modified nucleoside
  modified_base 2: mod_base = OTHER; note = 2-O-methyl modified nucleoside
  modified_base 3: mod_base = OTHER; note = 2-O-methyl modified nucleoside
  modified_base 4: mod_base = OTHER; note = 2-O-methyl modified nucleoside
  modified_base 7: mod_base = OTHER; note = 2-O-methyl modified nucleoside
  modified_base 8: mod_base = OTHER; note = 2-O-methyl modified nucleoside
  modified_base 10: mod_base = OTHER; note = 2-O-methyl modified nucleoside
  modified_base 12: mod_base = OTHER; note = 2-O-methyl modified nucleoside
  modified_base 13: mod_base = OTHER; note = 2-O-methyl modified nucleoside
  modified_base 14: mod_base = OTHER; note = 2-O-methyl modified nucleoside
  modified_base 15: mod_base = OTHER; note = 2-O-methyl modified nucleoside
  modified_base 16: mod_base = OTHER; note = 2-O-methyl modified nucleoside
  modified_base 17: mod_base = OTHER; note = 2-O-methyl modified nucleoside
  modified_base 18: mod_base = OTHER; note = 2-O-methyl modified nucleoside
  modified_base 19: mod_base = OTHER; note = 2-O-methyl modified nucleoside
  modified_base 20: mod_base = OTHER; note = 2-O-methyl modified nucleoside
  modified_base 21: mod_base = OTHER; note = 2-O-methyl modified nucleoside
  modified_base 6: mod_base = OTHER; note = 2-O-methyl modified nucleoside
ctgatgagcgctgcttctatt

SEQ ID NO: 4130 - RNA, 21 nt, synthetic construct
  source 1..21: mol_type = other RNA
  modified_base 8: mod_base = OTHER; note = 2-fluoro-modified nucleoside
  modified_base 9: mod_base = OTHER; note = 2-fluoro-modified nucleoside
  modified_base 11: mod_base = OTHER; note = 2-fluoro-modified nucleoside
  modified_base 1^2: mod_base = OTHER; note = phosphorothioate linkage
  modified_base 2^3: mod_base = OTHER; note = phosphorothioate linkage
  modified_base 19^20: mod_base = OTHER; note = phosphorothioate linkage
  modified_base 1: mod_base = OTHER; note = 2-O-methyl modified nucleoside
  modified_base 2: mod_base = OTHER; note = 2-O-methyl modified nucleoside
  modified_base 3: mod_base = OTHER; note = 2-O-methyl modified nucleoside
  modified_base 4: mod_base = OTHER; note = 2-O-methyl modified nucleoside
  modified_base 5: mod_base = OTHER; note = 2-O-methyl modified nucleoside
  modified_base 6: mod_base = OTHER; note = 2-O-methyl modified nucleoside
  modified_base 7: mod_base = OTHER; note = 2-O-methyl modified nucleoside
  modified_base 10: mod_base = OTHER; note = 2-O-methyl modified nucleoside
  modified_base 12: mod_base = OTHER; note = 2-O-methyl modified nucleoside
  modified_base 13: mod_base = OTHER; note = 2-O-methyl modified nucleoside
  modified_base 14: mod_base = OTHER; note = 2-O-methyl modified nucleoside
  modified_base 15: mod_base = OTHER; note = 2-O-methyl modified nucleoside
  modified_base 16: mod_base = OTHER; note = 2-O-methyl modified nucleoside
  modified_base 17: mod_base = OTHER; note = 2-O-methyl modified nucleoside
  modified_base 18: mod_base = OTHER; note = 2-O-methyl modified nucleoside
  modified_base 20: mod_base = OTHER; note = 2-O-methyl modified nucleoside
  modified_base 21: mod_base = OTHER; note = 2-O-methyl modified nucleoside
cagcacttcttcaaccgcatt

SEQ ID NO: 4131 - RNA, 21 nt, synthetic construct
  source 1..21: mol_type = other RNA
  modified_base 8: mod_base = OTHER; note = 2-fluoro-modified nucleoside
  modified_base 9: mod_base = OTHER; note = 2-fluoro-modified nucleoside
  modified_base 10: mod_base = OTHER; note = 2-fluoro-modified nucleoside
  modified_base 11: mod_base = OTHER; note = 2-fluoro-modified nucleoside
  modified_base 1^2: mod_base = OTHER; note = phosphorothioate linkage
  modified_base 2^3: mod_base = OTHER; note = phosphorothioate linkage
  modified_base 19^20: mod_base = OTHER; note = phosphorothioate linkage
  modified_base 20^21: mod_base = OTHER; note = phosphorothioate linkage
  modified_base 1: mod_base = OTHER; note = 2-O-methyl modified nucleoside
  modified_base 2: mod_base = OTHER; note = 2-O-methyl modified nucleoside
  modified_base 3: mod_base = OTHER; note = 2-O-methyl modified nucleoside
  modified_base 4: mod_base = OTHER; note = 2-O-methyl modified nucleoside
  modified_base 5: mod_base = OTHER; note = 2-O-methyl modified nucleoside
  modified_base 6: mod_base = OTHER; note = 2-O-methyl modified nucleoside
  modified_base 7: mod_base = OTHER; note = 2-O-methyl modified nucleoside
  modified_base 12: mod_base = OTHER; note = 2-O-methyl modified nucleoside
  modified_base 13: mod_base = OTHER; note = 2-O-methyl modified nucleoside
  modified_base 14: mod_base = OTHER; note = 2-O-methyl modified nucleoside
  modified_base 15: mod_base = OTHER; note = 2-O-methyl modified nucleoside
  modified_base 16: mod_base = OTHER; note = 2-O-methyl modified nucleoside
  modified_base 17: mod_base = OTHER; note = 2-O-methyl modified nucleoside
  modified_base 18: mod_base = OTHER; note = 2-O-methyl modified nucleoside
  modified_base 19: mod_base = OTHER; note = 2-O-methyl modified nucleoside
  modified_base 20: mod_base = OTHER; note = 2-O-methyl modified nucleoside
  modified_base 21: mod_base = OTHER; note = 2-O-methyl modified nucleoside
cagcacttcttcaaccgcatt

SEQ ID NO: 4132 - RNA, 21 nt, synthetic construct
  source 1..21: mol_type = other RNA
  modified_base 7: mod_base = OTHER; note = 2-fluoro-modified nucleoside
  modified_base 9: mod_base = OTHER; note = 2-fluoro-modified nucleoside
  modified_base 11: mod_base = OTHER; note = 2-fluoro-modified nucleoside
  modified_base 1^2: mod_base = OTHER; note = phosphorothioate linkage
  modified_base 2^3: mod_base = OTHER; note = phosphorothioate linkage
  modified_base 19^20: mod_base = OTHER; note = phosphorothioate linkage
  modified_base 20^21: mod_base = OTHER; note = phosphorothioate linkage
  modified_base 1: mod_base = OTHER; note = 2-O-methyl modified nucleoside
  modified_base 2: mod_base = OTHER; note = 2-O-methyl modified nucleoside
  modified_base 3: mod_base = OTHER; note = 2-O-methyl modified nucleoside
  modified_base 4: mod_base = OTHER; note = 2-O-methyl modified nucleoside
  modified_base 5: mod_base = OTHER; note = 2-O-methyl modified nucleoside
  modified_base 6: mod_base = OTHER; note = 2-O-methyl modified nucleoside
  modified_base 8: mod_base = OTHER; note = 2-O-methyl modified nucleoside
  modified_base 10: mod_base = OTHER; note = 2-O-methyl modified nucleoside
  modified_base 12: mod_base = OTHER; note = 2-O-methyl modified nucleoside
  modified_base 13: mod_base = OTHER; note = 2-O-methyl modified nucleoside
  modified_base 14: mod_base = OTHER; note = 2-O-methyl modified nucleoside
  modified_base 15: mod_base = OTHER; note = 2-O-methyl modified nucleoside
  modified_base 16: mod_base = OTHER; note = 2-O-methyl modified nucleoside
  modified_base 17: mod_base = OTHER; note = 2-O-methyl modified nucleoside
  modified_base 18: mod_base = OTHER; note = 2-O-methyl modified nucleoside
  modified_base 19: mod_base = OTHER; note = 2-O-methyl modified nucleoside
  modified_base 20: mod_base = OTHER; note = 2-O-methyl modified nucleoside
  modified_base 21: mod_base = OTHER; note = 2-O-methyl modified nucleoside
cagcacttcttcaaccgcatt

SEQ ID NO: 4133 - RNA, 21 nt, synthetic construct
  source 1..21: mol_type = other RNA
  modified_base 7: mod_base = OTHER; note = 2-fluoro-modified nucleoside
  modified_base 9: mod_base = OTHER; note = 2-fluoro-modified nucleoside
  modified_base 10: mod_base = OTHER; note = 2-fluoro-modified nucleoside
  modified_base 1^2: mod_base = OTHER; note = phosphorothioate linkage
  modified_base 2^3: mod_base = OTHER; note = phosphorothioate linkage
  modified_base 19^20: mod_base = OTHER; note = phosphorothioate linkage
  modified_base 20^21: mod_base = OTHER; note = phosphorothioate linkage
  modified_base 1: mod_base = OTHER; note = 2-O-methyl modified nucleoside
  modified_base 2: mod_base = OTHER; note = 2-O-methyl modified nucleoside
  modified_base 3: mod_base = OTHER; note = 2-O-methyl modified nucleoside
  modified_base 4: mod_base = OTHER; note = 2-O-methyl modified nucleoside
  modified_base 5: mod_base = OTHER; note = 2-O-methyl modified nucleoside
  modified_base 6: mod_base = OTHER; note = 2-O-methyl modified nucleoside
  modified_base 8: mod_base = OTHER; note = 2-O-methyl modified nucleoside
  modified_base 11: mod_base = OTHER; note = 2-O-methyl modified nucleoside
  modified_base 12: mod_base = OTHER; note = 2-O-methyl modified nucleoside
  modified_base 13: mod_base = OTHER; note = 2-O-methyl modified nucleoside
  modified_base 14: mod_base = OTHER; note = 2-O-methyl modified nucleoside
  modified_base 15: mod_base = OTHER; note = 2-O-methyl modified nucleoside
  modified_base 16: mod_base = OTHER; note = 2-O-methyl modified nucleoside
  modified_base 17: mod_base = OTHER; note = 2-O-methyl modified nucleoside
  modified_base 18: mod_base = OTHER; note = 2-O-methyl modified nucleoside
  modified_base 19: mod_base = OTHER; note = 2-O-methyl modified nucleoside
  modified_base 20: mod_base = OTHER; note = 2-O-methyl modified nucleoside
  modified_base 21: mod_base = OTHER; note = 2-O-methyl modified nucleoside
cagcacttcttcaaccgcatt

SEQ ID NO: 4134 - RNA, 21 nt, synthetic construct
  source 1..21: mol_type = other RNA
  modified_base 7: mod_base = OTHER; note = 2-fluoro-modified nucleoside
  modified_base 8: mod_base = OTHER; note = 2-fluoro-modified nucleoside
  modified_base 9: mod_base = OTHER; note = 2-fluoro-modified nucleoside
  modified_base 10: mod_base = OTHER; note = 2-fluoro-modified nucleoside
  modified_base 1^2: mod_base = OTHER; note = phosphorothioate linkage
  modified_base 2^3: mod_base = OTHER; note = phosphorothioate linkage
  modified_base 19^20: mod_base = OTHER; note = phosphorothioate linkage
  modified_base 20^21: mod_base = OTHER; note = phosphorothioate linkage
  modified_base 1: mod_base = OTHER; note = 2-O-methyl modified nucleoside
  modified_base 2: mod_base = OTHER; note = 2-O-methyl modified nucleoside
  modified_base 3: mod_base = OTHER; note = 2-O-methyl modified nucleoside
  modified_base 4: mod_base = OTHER; note = 2-O-methyl modified nucleoside
  modified_base 5: mod_base = OTHER; note = 2-O-methyl modified nucleoside
  modified_base 6: mod_base = OTHER; note = 2-O-methyl modified nucleoside
  modified_base 11: mod_base = OTHER; note = 2-O-methyl modified nucleoside
  modified_base 12: mod_base = OTHER; note = 2-O-methyl modified nucleoside
  modified_base 13: mod_base = OTHER; note = 2-O-methyl modified nucleoside
  modified_base 14: mod_base = OTHER; note = 2-O-methyl modified nucleoside
  modified_base 15: mod_base = OTHER; note = 2-O-methyl modified nucleoside
  modified_base 15: mod_base = OTHER; note = 2-O-methyl modified nucleoside
  modified_base 16: mod_base = OTHER; note = 2-O-methyl modified nucleoside
  modified_base 17: mod_base = OTHER; note = 2-O-methyl modified nucleoside
  modified_base 18: mod_base = OTHER; note = 2-O-methyl modified nucleoside
  modified_base 19: mod_base = OTHER; note = 2-O-methyl modified nucleoside
  modified_base 20: mod_base = OTHER; note = 2-O-methyl modified nucleoside
  modified_base 21: mod_base = OTHER; note = 2-O-methyl modified nucleoside
cagcacttcttcaaccgcatt

SEQ ID NO: 4135 - RNA, 21 nt, synthetic construct
  source 1..21: mol_type = other RNA
  modified_base 7: mod_base = OTHER; note = 2-fluoro-modified nucleoside
  modified_base 8: mod_base = OTHER; note = 2-fluoro-modified nucleoside
  modified_base 9: mod_base = OTHER; note = 2-fluoro-modified nucleoside
  modified_base 10: mod_base = OTHER; note = 2-fluoro-modified nucleoside
  modified_base 11: mod_base = OTHER; note = 2-fluoro-modified nucleoside
  modified_base 1^2: mod_base = OTHER; note = phosphorothioate linkage
  modified_base 2^3: mod_base = OTHER; note = phosphorothioate linkage
  modified_base 19^20: mod_base = OTHER; note = phosphorothioate linkage
  modified_base 20^21: mod_base = OTHER; note = phosphorothioate linkage
  modified_base 1: mod_base = OTHER; note = 2-O-methyl modified nucleoside
  modified_base 2: mod_base = OTHER; note = 2-O-methyl modified nucleoside
  modified_base 3: mod_base = OTHER; note = 2-O-methyl modified nucleoside
  modified_base 4: mod_base = OTHER; note = 2-O-methyl modified nucleoside
  modified_base 5: mod_base = OTHER; note = 2-O-methyl modified nucleoside
  modified_base 6: mod_base = OTHER; note = 2-O-methyl modified nucleoside
  modified_base 12: mod_base = OTHER; note = 2-O-methyl modified nucleoside
  modified_base 13: mod_base = OTHER; note = 2-O-methyl modified nucleoside
  modified_base 14: mod_base = OTHER; note = 2-O-methyl modified nucleoside
  modified_base 15: mod_base = OTHER; note = 2-O-methyl modified nucleoside
  modified_base 16: mod_base = OTHER; note = 2-O-methyl modified nucleoside
  modified_base 17: mod_base = OTHER; note = 2-O-methyl modified nucleoside
  modified_base 18: mod_base = OTHER; note = 2-O-methyl modified nucleoside
  modified_base 19: mod_base = OTHER; note = 2-O-methyl modified nucleoside
  modified_base 20: mod_base = OTHER; note = 2-O-methyl modified nucleoside
  modified_base 21: mod_base = OTHER; note = 2-O-methyl modified nucleoside
cagcacttcttcaaccgcatt

SEQ ID NO: 4136 - RNA, 21 nt, synthetic construct
  source 1..21: mol_type = other RNA
  modified_base 6: mod_base = OTHER; note = 2-fluoro-modified nucleoside
  modified_base 9: mod_base = OTHER; note = 2-fluoro-modified nucleoside
  modified_base 11: mod_base = OTHER; note = 2-fluoro-modified nucleoside
  modified_base 1^2: mod_base = OTHER; note = phosphorothioate linkage
  modified_base 2^3: mod_base = OTHER; note = phosphorothioate linkage
  modified_base 19^20: mod_base = OTHER; note = phosphorothioate linkage
  modified_base 20^21: mod_base = OTHER; note = phosphorothioate linkage
  modified_base 1: mod_base = OTHER; note = 2-O-methyl modified nucleoside
  modified_base 2: mod_base = OTHER; note = 2-O-methyl modified nucleoside
  modified_base 3: mod_base = OTHER; note = 2-O-methyl modified nucleoside
  modified_base 4: mod_base = OTHER; note = 2-O-methyl modified nucleoside
  modified_base 5: mod_base = OTHER; note = 2-O-methyl modified nucleoside
  modified_base 7: mod_base = OTHER; note = 2-O-methyl modified nucleoside
  modified_base 8: mod_base = OTHER; note = 2-O-methyl modified nucleoside
  modified_base 10: mod_base = OTHER; note = 2-O-methyl modified nucleoside
  modified_base 12: mod_base = OTHER; note = 2-O-methyl modified nucleoside
  modified_base 13: mod_base = OTHER; note = 2-O-methyl modified nucleoside
  modified_base 14: mod_base = OTHER; note = 2-O-methyl modified nucleoside
  modified_base 15: mod_base = OTHER; note = 2-O-methyl modified nucleoside
  modified_base 17: mod_base = OTHER; note = 2-O-methyl modified nucleoside
  modified_base 18: mod_base = OTHER; note = 2-O-methyl modified nucleoside
  modified_base 19: mod_base = OTHER; note = 2-O-methyl modified nucleoside
  modified_base 20: mod_base = OTHER; note = 2-O-methyl modified nucleoside
  modified_base 21: mod_base = OTHER; note = 2-O-methyl modified nucleoside
cagcacttcttcaaccgcatt

SEQ ID NO: 4137 - RNA, 21 nt, synthetic construct
  source 1..21: mol_type = other RNA
  modified_base 6: mod_base = OTHER; note = 2-fluoro-modified nucleoside
  modified_base 9: mod_base = OTHER; note = 2-fluoro-modified nucleoside
  modified_base 10: mod_base = OTHER; note = 2-fluoro-modified nucleoside
  modified_base 1^2: mod_base = OTHER; note = phosphorothioate linkage
  modified_base 2^3: mod_base = OTHER; note = phosphorothioate linkage
  modified_base 19^20: mod_base = OTHER; note = phosphorothioate linkage
  modified_base 20^21: mod_base = OTHER; note = phosphorothioate linkage
  modified_base 1: mod_base = OTHER; note = 2-O-methyl modified nucleoside
  modified_base 2: mod_base = OTHER; note = 2-O-methyl modified nucleoside
  modified_base 3: mod_base = OTHER; note = 2-O-methyl modified nucleoside
  modified_base 4: mod_base = OTHER; note = 2-O-methyl modified nucleoside
  modified_base 5: mod_base = OTHER; note = 2-O-methyl modified nucleoside
  modified_base 7: mod_base = OTHER; note = 2-O-methyl modified nucleoside
  modified_base 8: mod_base = OTHER; note = 2-O-methyl modified nucleoside
  modified_base 11: mod_base = OTHER; note = 2-O-methyl modified nucleoside
  modified_base 12: mod_base = OTHER; note = 2-O-methyl modified nucleoside
  modified_base 13: mod_base = OTHER; note = 2-O-methyl modified nucleoside
  modified_base 14: mod_base = OTHER; note = 2-O-methyl modified nucleoside
  modified_base 15: mod_base = OTHER; note = 2-O-methyl modified nucleoside
  modified_base 16: mod_base = OTHER; note = 2-O-methyl modified nucleoside
  modified_base 17: mod_base = OTHER; note = 2-O-methyl modified nucleoside
  modified_base 18: mod_base = OTHER; note = 2-O-methyl modified nucleoside
  modified_base 19: mod_base = OTHER; note = 2-O-methyl modified nucleoside
  modified_base 20: mod_base = OTHER; note = 2-O-methyl modified nucleoside
  modified_base 21: mod_base = OTHER; note = 2-O-methyl modified nucleoside
cagcacttcttcaaccgcatt

SEQ ID NO: 4138 - RNA, 21 nt, synthetic construct
  source 1..21: mol_type = other RNA
  modified_base 6: mod_base = OTHER; note = 2-fluoro-modified nucleoside
  modified_base 9: mod_base = OTHER; note = 2-fluoro-modified nucleoside
  modified_base 10: mod_base = OTHER; note = 2-fluoro-modified nucleoside
  modified_base 1^2: mod_base = OTHER; note = phosphorothioate linkage
  modified_base 2^3: mod_base = OTHER; note = phosphorothioate linkage
  modified_base 19^20: mod_base = OTHER; note = phosphorothioate linkage
  modified_base 20^21: mod_base = OTHER; note = phosphorothioate linkage
  modified_base 1: mod_base = OTHER; note = 2-O-methyl modified nucleoside
  modified_base 2: mod_base = OTHER; note = 2-O-methyl modified nucleoside
  modified_base 3: mod_base = OTHER; note = 2-O-methyl modified nucleoside
  modified_base 4: mod_base = OTHER; note = 2-O-methyl modified nucleoside
  modified_base 5: mod_base = OTHER; note = 2-O-methyl modified nucleoside
  modified_base 7: mod_base = OTHER; note = 2-O-methyl modified nucleoside
  modified_base 11: mod_base = OTHER; note = 2-O-methyl modified nucleoside
  modified_base 12: mod_base = OTHER; note = 2-O-methyl modified nucleoside
  modified_base 13: mod_base = OTHER; note = 2-O-methyl modified nucleoside
  modified_base 14: mod_base = OTHER; note = 2-O-methyl modified nucleoside
  modified_base 15: mod_base = OTHER; note = 2-O-methyl modified nucleoside
  modified_base 16: mod_base = OTHER; note = 2-O-methyl modified nucleoside
  modified_base 17: mod_base = OTHER; note = 2-O-methyl modified nucleoside
  modified_base 18: mod_base = OTHER; note = 2-O-methyl modified nucleoside
  modified_base 19: mod_base = OTHER; note = 2-O-methyl modified nucleoside
  modified_base 20: mod_base = OTHER; note = 2-O-methyl modified nucleoside
  modified_base 21: mod_base = OTHER; note = 2-O-methyl modified nucleoside
cagcacttcttcaaccgcatt

SEQ ID NO: 4139 - RNA, 21 nt, synthetic construct
  source 1..21: mol_type = other RNA
  modified_base 6: mod_base = OTHER; note = 2-fluoro-modified nucleoside
  modified_base 8: mod_base = OTHER; note = 2-fluoro-modified nucleoside
  modified_base 9: mod_base = OTHER; note = 2-fluoro-modified nucleoside
  modified_base 11: mod_base = OTHER; note = 2-fluoro-modified nucleoside
  modified_base 1^2: mod_base = OTHER; note = phosphorothioate linkage
  modified_base 2^3: mod_base = OTHER; note = phosphorothioate linkage
  modified_base 19^20: mod_base = OTHER; note = phosphorothioate linkage
  modified_base 20^21: mod_base = OTHER; note = phosphorothioate linkage
  modified_base 1: mod_base = OTHER; note = 2-O-methyl modified nucleoside
  modified_base 2: mod_base = OTHER; note = 2-O-methyl modified nucleoside
  modified_base 3: mod_base = OTHER; note = 2-O-methyl modified nucleoside
  modified_base 4: mod_base = OTHER; note = 2-O-methyl modified nucleoside
  modified_base 5: mod_base = OTHER; note = 2-O-methyl modified nucleoside
  modified_base 7: mod_base = OTHER; note = 2-O-methyl modified nucleoside
  modified_base 10: mod_base = OTHER; note = 2-O-methyl modified nucleoside
  modified_base 12: mod_base = OTHER; note = 2-O-methyl modified nucleoside
  modified_base 13: mod_base = OTHER; note = 2-O-methyl modified nucleoside
  modified_base 14: mod_base = OTHER; note = 2-O-methyl modified nucleoside
  modified_base 15: mod_base = OTHER; note = 2-O-methyl modified nucleoside
  modified_base 16: mod_base = OTHER; note = 2-O-methyl modified nucleoside
  modified_base 17: mod_base = OTHER; note = 2-O-methyl modified nucleoside
  modified_base 18: mod_base = OTHER; note = 2-O-methyl modified nucleoside
  modified_base 19: mod_base = OTHER; note = 2-O-methyl modified nucleoside
  modified_base 20: mod_base = OTHER; note = 2-O-methyl modified nucleoside
  modified_base 21: mod_base = OTHER; note = 2-O-methyl modified nucleoside
cagcacttcttcaaccgcatt

SEQ ID NO: 4140 - RNA, 21 nt, synthetic construct
  source 1..21: mol_type = other RNA
  modified_base 6: mod_base = OTHER; note = 2-fluoro-modified nucleoside
  modified_base 8: mod_base = OTHER; note = 2-fluoro-modified nucleoside
  modified_base 9: mod_base = OTHER; note = 2-fluoro-modified nucleoside
  modified_base 10: mod_base = OTHER; note = 2-fluoro-modified nucleoside
  modified_base 11: mod_base = OTHER; note = 2-fluoro-modified nucleoside
  modified_base 1^2: mod_base = OTHER; note = phosphorothioate linkage
  modified_base 2^3: mod_base = OTHER; note = phosphorothioate linkage
  modified_base 19^20: mod_base = OTHER; note = phosphorothioate linkage
  modified_base 20^21: mod_base = OTHER; note = phosphorothioate linkage
  modified_base 1: mod_base = OTHER; note = 2-O-methyl modified nucleoside
  modified_base 2: mod_base = OTHER; note = 2-O-methyl modified nucleoside
  modified_base 3: mod_base = OTHER; note = 2-O-methyl modified nucleoside
  modified_base 4: mod_base = OTHER; note = 2-O-methyl modified nucleoside
  modified_base 5: mod_base = OTHER; note = 2-O-methyl modified nucleoside
  modified_base 7: mod_base = OTHER; note = 2-O-methyl modified nucleoside
  modified_base 12: mod_base = OTHER; note = 2-O-methyl modified nucleoside
  modified_base 13: mod_base = OTHER; note = 2-O-methyl modified nucleoside
  modified_base 14: mod_base = OTHER; note = 2-O-methyl modified nucleoside
  modified_base 15: mod_base = OTHER; note = 2-O-methyl modified nucleoside
  modified_base 16: mod_base = OTHER; note = 2-O-methyl modified nucleoside
  modified_base 17: mod_base = OTHER; note = 2-O-methyl modified nucleoside
  modified_base 18: mod_base = OTHER; note = 2-O-methyl modified nucleoside
  modified_base 19: mod_base = OTHER; note = 2-O-methyl modified nucleoside
  modified_base 20: mod_base = OTHER; note = 2-O-methyl modified nucleoside
  modified_base 21: mod_base = OTHER; note = 2-O-methyl modified nucleoside
cagcacttcttcaaccgcatt

SEQ ID NO: 4141 - RNA, 21 nt, synthetic construct
  source 1..21: mol_type = other RNA
  modified_base 6: mod_base = OTHER; note = 2-fluoro-modified nucleoside
  modified_base 7: mod_base = OTHER; note = 2-fluoro-modified nucleoside
  modified_base 9: mod_base = OTHER; note = 2-fluoro-modified nucleoside
  modified_base 1^2: mod_base = OTHER; note = phosphorothioate linkage
  modified_base 2^3: mod_base = OTHER; note = phosphorothioate linkage
  modified_base 19^20: mod_base = OTHER; note = phosphorothioate linkage
  modified_base 20^21: mod_base = OTHER; note = phosphorothioate linkage
  modified_base 1: mod_base = OTHER; note = 2-O-methyl modified nucleoside
  modified_base 2: mod_base = OTHER; note = 2-O-methyl modified nucleoside
  modified_base 3: mod_base = OTHER; note = 2-O-methyl modified nucleoside
  modified_base 4: mod_base = OTHER; note = 2-O-methyl modified nucleoside
  modified_base 5: mod_base = OTHER; note = 2-O-methyl modified nucleoside
  modified_base 8: mod_base = OTHER; note = 2-O-methyl modified nucleoside
  modified_base 10: mod_base = OTHER; note = 2-O-methyl modified nucleoside
  modified_base 11: mod_base = OTHER; note = 2-O-methyl modified nucleoside
  modified_base 12: mod_base = OTHER; note = 2-O-methyl modified nucleoside
  modified_base 13: mod_base = OTHER; note = 2-O-methyl modified nucleoside
  modified_base 14: mod_base = OTHER; note = 2-O-methyl modified nucleoside
  modified_base 15: mod_base = OTHER; note = 2-O-methyl modified nucleoside
  modified_base 16: mod_base = OTHER; note = 2-O-methyl modified nucleoside
  modified_base 17: mod_base = OTHER; note = 2-O-methyl modified nucleoside
  modified_base 18: mod_base = OTHER; note = 2-O-methyl modified nucleoside
  modified_base 19: mod_base = OTHER; note = 2-O-methyl modified nucleoside
  modified_base 20: mod_base = OTHER; note = 2-O-methyl modified nucleoside
  modified_base 21: mod_base = OTHER; note = 2-O-methyl modified nucleoside
cagcacttcttcaaccgcatt

SEQ ID NO: 4142 - RNA, 21 nt, synthetic construct
  source 1..21: mol_type = other RNA
  modified_base 6: mod_base = OTHER; note = 2-fluoro-modified nucleoside
  modified_base 7: mod_base = OTHER; note = 2-fluoro-modified nucleoside
  modified_base 9: mod_base = OTHER; note = 2-fluoro-modified nucleoside
  modified_base 11: mod_base = OTHER; note = 2-fluoro-modified nucleoside
  modified_base 1^2: mod_base = OTHER; note = phosphorothioate linkage
  modified_base 2^3: mod_base = OTHER; note = phosphorothioate linkage
  modified_base 19^20: mod_base = OTHER; note = phosphorothioate linkage
  modified_base 20^21: mod_base = OTHER; note = phosphorothioate linkage
  modified_base 1: mod_base = OTHER; note = 2-O-methyl modified nucleoside
  modified_base 2: mod_base = OTHER; note = 2-O-methyl modified nucleoside
  modified_base 3: mod_base = OTHER; note = 2-O-methyl modified nucleoside
  modified_base 4: mod_base = OTHER; note = 2-O-methyl modified nucleoside
  modified_base 5: mod_base = OTHER; note = 2-O-methyl modified nucleoside
  modified_base 8: mod_base = OTHER; note = 2-O-methyl modified nucleoside
  modified_base 10: mod_base = OTHER; note = 2-O-methyl modified nucleoside
  modified_base 12: mod_base = OTHER; note = 2-O-methyl modified nucleoside
  modified_base 13: mod_base = OTHER; note = 2-O-methyl modified nucleoside
  modified_base 14: mod_base = OTHER; note = 2-O-methyl modified nucleoside
  modified_base 15: mod_base = OTHER; note = 2-O-methyl modified nucleoside
  modified_base 15: mod_base = OTHER; note = 2-O-methyl modified nucleoside
  modified_base 16: mod_base = OTHER; note = 2-O-methyl modified nucleoside
  modified_base 17: mod_base = OTHER; note = 2-O-methyl modified nucleoside
  modified_base 18: mod_base = OTHER; note = 2-O-methyl modified nucleoside
  modified_base 19: mod_base = OTHER; note = 2-O-methyl modified nucleoside
  modified_base 20: mod_base = OTHER; note = 2-O-methyl modified nucleoside
  modified_base 21: mod_base = OTHER; note = 2-O-methyl modified nucleoside
cagcacttcttcaaccgcatt

SEQ ID NO: 4143 - RNA, 21 nt, synthetic construct
  source 1..21: mol_type = other RNA
  modified_base 6: mod_base = OTHER; note = 2-fluoro-modified nucleoside
  modified_base 7: mod_base = OTHER; note = 2-fluoro-modified nucleoside
  modified_base 9: mod_base = OTHER; note = 2-fluoro-modified nucleoside
  modified_base 10: mod_base = OTHER; note = 2-fluoro-modified nucleoside
  modified_base 1^2: mod_base = OTHER; note = phosphorothioate linkage
  modified_base 2^3: mod_base = OTHER; note = phosphorothioate linkage
  modified_base 19^20: mod_base = OTHER; note = phosphorothioate linkage
  modified_base 20^21: mod_base = OTHER; note = phosphorothioate linkage
  modified_base 1: mod_base = OTHER; note = 2-O-methyl modified nucleoside
  modified_base 2: mod_base = OTHER; note = 2-O-methyl modified nucleoside
  modified_base 3: mod_base = OTHER; note = 2-O-methyl modified nucleoside
  modified_base 4: mod_base = OTHER; note = 2-O-methyl modified nucleoside
  modified_base 5: mod_base = OTHER; note = 2-O-methyl modified nucleoside
  modified_base 8: mod_base = OTHER; note = 2-O-methyl modified nucleoside
  modified_base 11: mod_base = OTHER; note = 2-O-methyl modified nucleoside
  modified_base 12: mod_base = OTHER; note = 2-O-methyl modified nucleoside
  modified_base 13: mod_base = OTHER; note = 2-O-methyl modified nucleoside
  modified_base 14: mod_base = OTHER; note = 2-O-methyl modified nucleoside
  modified_base 15: mod_base = OTHER; note = 2-O-methyl modified nucleoside
  modified_base 16: mod_base = OTHER; note = 2-O-methyl modified nucleoside
  modified_base 17: mod_base = OTHER; note = 2-O-methyl modified nucleoside
  modified_base 18: mod_base = OTHER; note = 2-O-methyl modified nucleoside
  modified_base 19: mod_base = OTHER; note = 2-O-methyl modified nucleoside
  modified_base 21: mod_base = OTHER; note = 2-O-methyl modified nucleoside
cagcacttcttcaaccgcatt

SEQ ID NO: 4144 - RNA, 21 nt, synthetic construct
  source 1..21: mol_type = other RNA
  modified_base 6: mod_base = OTHER; note = 2-fluoro-modified nucleoside
  modified_base 7: mod_base = OTHER; note = 2-fluoro-modified nucleoside
  modified_base 8: mod_base = OTHER; note = 2-fluoro-modified nucleoside
  modified_base 9: mod_base = OTHER; note = 2-fluoro-modified nucleoside
  modified_base 1^2: mod_base = OTHER; note = phosphorothioate linkage
  modified_base 2^3: mod_base = OTHER; note = phosphorothioate linkage
  modified_base 19^20: mod_base = OTHER; note = phosphorothioate linkage
  modified_base 20^21: mod_base = OTHER; note = phosphorothioate linkage
  modified_base 1: mod_base = OTHER; note = 2-O-methyl modified nucleoside
  modified_base 2: mod_base = OTHER; note = 2-O-methyl modified nucleoside
  modified_base 3: mod_base = OTHER; note = 2-O-methyl modified nucleoside
  modified_base 4: mod_base = OTHER; note = 2-O-methyl modified nucleoside
  modified_base 5: mod_base = OTHER; note = 2-O-methyl modified nucleoside
  modified_base 10: mod_base = OTHER; note = 2-O-methyl modified nucleoside
  modified_base 11: mod_base = OTHER; note = 2-O-methyl modified nucleoside
  modified_base 12: mod_base = OTHER; note = 2-O-methyl modified nucleoside
  modified_base 13: mod_base = OTHER; note = 2-O-methyl modified nucleoside
  modified_base 14: mod_base = OTHER; note = 2-O-methyl modified nucleoside
  modified_base 15: mod_base = OTHER; note = 2-O-methyl modified nucleoside
  modified_base 16: mod_base = OTHER; note = 2-O-methyl modified nucleoside
  modified_base 17: mod_base = OTHER; note = 2-O-methyl modified nucleoside
  modified_base 18: mod_base = OTHER; note = 2-O-methyl modified nucleoside
  modified_base 19: mod_base = OTHER; note = 2-O-methyl modified nucleoside
  modified_base 20: mod_base = OTHER; note = 2-O-methyl modified nucleoside
  modified_base 21: mod_base = OTHER; note = 2-O-methyl modified nucleoside
cagcacttcttcaaccgcatt

SEQ ID NO: 4145 - RNA, 21 nt, synthetic construct
  source 1..21: mol_type = other RNA
  modified_base 6: mod_base = OTHER; note = 2-fluoro-modified nucleoside
  modified_base 7: mod_base = OTHER; note = 2-fluoro-modified nucleoside
  modified_base 8: mod_base = OTHER; note = 2-fluoro-modified nucleoside
  modified_base 9: mod_base = OTHER; note = 2-fluoro-modified nucleoside
  modified_base 11: mod_base = OTHER; note = 2-fluoro-modified nucleoside
  modified_base 1^2: mod_base = OTHER; note = phosphorothioate linkage
  modified_base 2^3: mod_base = OTHER; note = phosphorothioate linkage
  modified_base 19^20: mod_base = OTHER; note = phosphorothioate linkage
  modified_base 20^21: mod_base = OTHER; note = phosphorothioate linkage
  modified_base 1: mod_base = OTHER; note = 2-O-methyl modified nucleoside
  modified_base 2: mod_base = OTHER; note = 2-O-methyl modified nucleoside
  modified_base 3: mod_base = OTHER; note = 2-O-methyl modified nucleoside
  modified_base 4: mod_base = OTHER; note = 2-O-methyl modified nucleoside
  modified_base 5: mod_base = OTHER; note = 2-O-methyl modified nucleoside
  modified_base 10: mod_base = OTHER; note = 2-O-methyl modified nucleoside
  modified_base 12: mod_base = OTHER; note = 2-O-methyl modified nucleoside
  modified_base 13: mod_base = OTHER; note = 2-O-methyl modified nucleoside
  modified_base 14: mod_base = OTHER; note = 2-O-methyl modified nucleoside
  modified_base 15: mod_base = OTHER; note = 2-O-methyl modified nucleoside
  modified_base 16: mod_base = OTHER; note = 2-O-methyl modified nucleoside
  modified_base 17: mod_base = OTHER; note = 2-O-methyl modified nucleoside
  modified_base 18: mod_base = OTHER; note = 2-O-methyl modified nucleoside
  modified_base 19: mod_base = OTHER; note = 2-O-methyl modified nucleoside
  modified_base 20: mod_base = OTHER; note = 2-O-methyl modified nucleoside
  modified_base 21: mod_base = OTHER; note = 2-O-methyl modified nucleoside
cagcacttcttcaaccgcatt

SEQ ID NO: 4146 - RNA, 21 nt, synthetic construct
  source 1..21: mol_type = other RNA
  modified_base 6: mod_base = OTHER; note = 2-fluoro-modified nucleoside
  modified_base 7: mod_base = OTHER; note = 2-fluoro-modified nucleoside
  modified_base 8: mod_base = OTHER; note = 2-fluoro-modified nucleoside
  modified_base 9: mod_base = OTHER; note = 2-fluoro-modified nucleoside
  modified_base 10: mod_base = OTHER; note = 2-fluoro-modified nucleoside
  modified_base 1^2: mod_base = OTHER; note = phosphorothioate linkage
  modified_base 2^3: mod_base = OTHER; note = phosphorothioate linkage
  modified_base 19^20: mod_base = OTHER; note = phosphorothioate linkage
  modified_base 20^21: mod_base = OTHER; note = phosphorothioate linkage
  modified_base 1: mod_base = OTHER; note = 2-O-methyl modified nucleoside
  modified_base 2: mod_base = OTHER; note = 2-O-methyl modified nucleoside
  modified_base 3: mod_base = OTHER; note = 2-O-methyl modified nucleoside
  modified_base 4: mod_base = OTHER; note = 2-O-methyl modified nucleoside
  modified_base 5: mod_base = OTHER; note = 2-O-methyl modified nucleoside
  modified_base 11: mod_base = OTHER; note = 2-O-methyl modified nucleoside
  modified_base 12: mod_base = OTHER; note = 2-O-methyl modified nucleoside
  modified_base 13: mod_base = OTHER; note = 2-O-methyl modified nucleoside
  modified_base 14: mod_base = OTHER; note = 2-O-methyl modified nucleoside
  modified_base 15: mod_base = OTHER; note = 2-O-methyl modified nucleoside
  modified_base 16: mod_base = OTHER; note = 2-O-methyl modified nucleoside
  modified_base 17: mod_base = OTHER; note = 2-O-methyl modified nucleoside
  modified_base 18: mod_base = OTHER; note = 2-O-methyl modified nucleoside
  modified_base 19: mod_base = OTHER; note = 2-O-methyl modified nucleoside
  modified_base 20: mod_base = OTHER; note = 2-O-methyl modified nucleoside
  modified_base 21: mod_base = OTHER; note = 2-O-methyl modified nucleoside
cagcacttcttcaaccgcatt

SEQ ID NO: 4147 - RNA, 21 nt, synthetic construct
  source 1..21: mol_type = other RNA
  modified_base 9: mod_base = OTHER; note = 2-fluoro-modified nucleoside
  modified_base 10: mod_base = OTHER; note = 2-fluoro-modified nucleoside
  modified_base 1^2: mod_base = OTHER; note = phosphorothioate linkage
  modified_base 2^3: mod_base = OTHER; note = phosphorothioate linkage
  modified_base 19^20: mod_base = OTHER; note = phosphorothioate linkage
  modified_base 20^21: mod_base = OTHER; note = phosphorothioate linkage
acttcttcaaccgcacgaatt

SEQ ID NO: 4148 - RNA, 21 nt, synthetic construct
  source 1..21: mol_type = other RNA
  modified_base 6: mod_base = OTHER; note = 2-fluoro-modified nucleoside
  modified_base 9: mod_base = OTHER; note = 2-fluoro-modified nucleoside
  modified_base 11: mod_base = OTHER; note = 2-fluoro-modified nucleoside
  modified_base 1^2: mod_base = OTHER; note = phosphorothioate linkage
  modified_base 2^3: mod_base = OTHER; note = phosphorothioate linkage
  modified_base 19^20: mod_base = OTHER; note = phosphorothioate linkage
  modified_base 20^21: mod_base = OTHER; note = phosphorothioate linkage
accttcggcatcgagaagatt

SEQ ID NO: 4149 - RNA, 21 nt, synthetic construct
  source 1..21: mol_type = other RNA
  modified_base 5: mod_base = OTHER; note = 2-fluoro-modified nucleoside
  modified_base 9: mod_base = OTHER; note = 2-fluoro-modified nucleoside
  modified_base 11: mod_base = OTHER; note = 2-fluoro-modified nucleoside
  modified_base 1^2: mod_base = OTHER; note = phosphorothioate linkage
  modified_base 2^3: mod_base = OTHER; note = phosphorothioate linkage
  modified_base 19^20: mod_base = OTHER; note = phosphorothioate linkage
  modified_base 20^21: mod_base = OTHER; note = phosphorothioate linkage
accttcggcatcgagaagatt

SEQ ID NO: 4150 - RNA, 21 nt, synthetic construct
  source 1..21: mol_type = other RNA
  modified_base 5: mod_base = OTHER; note = 2-fluoro-modified nucleoside
  modified_base 6: mod_base = OTHER; note = 2-fluoro-modified nucleoside
  modified_base 10: mod_base = OTHER; note = 2-fluoro-modified nucleoside
  modified_base 1^2: mod_base = OTHER; note = phosphorothioate linkage
  modified_base 2^3: mod_base = OTHER; note = phosphorothioate linkage
  modified_base 19^20: mod_base = OTHER; note = phosphorothioate linkage
  modified_base 20^21: mod_base = OTHER; note = phosphorothioate linkage
accttcggcatcgagaagatt

SEQ ID NO: 4151 - RNA, 21 nt, synthetic construct
  source 1..21: mol_type = other RNA
  modified_base 5: mod_base = OTHER; note = 2-fluoro-modified nucleoside
  modified_base 6: mod_base = OTHER; note = 2-fluoro-modified nucleoside
  modified_base 9: mod_base = OTHER; note = 2-fluoro-modified nucleoside
  modified_base 11: mod_base = OTHER; note = 2-fluoro-modified nucleoside
  modified_base 1^2: mod_base = OTHER; note = phosphorothioate linkage
  modified_base 2^3: mod_base = OTHER; note = phosphorothioate linkage
  modified_base 19^20: mod_base = OTHER; note = phosphorothioate linkage
  modified_base 20^21: mod_base = OTHER; note = phosphorothioate linkage
accttcggcatcgagaagatt

SEQ ID NO: 4152 - RNA, 21 nt, synthetic construct
  source 1..21: mol_type = other RNA
  modified_base 6: mod_base = OTHER; note = 2-fluoro-modified nucleoside
  modified_base 8: mod_base = OTHER; note = 2-fluoro-modified nucleoside
  modified_base 9: mod_base = OTHER; note = 2-fluoro-modified nucleoside
  modified_base 1^2: mod_base = OTHER; note = phosphorothioate linkage
  modified_base 2^3: mod_base = OTHER; note = phosphorothioate linkage
  modified_base 19^20: mod_base = OTHER; note = phosphorothioate linkage
  modified_base 20^21: mod_base = OTHER; note = phosphorothioate linkage
ttcggcatcgagaagtacatt

SEQ ID NO: 4153 - RNA, 21 nt, synthetic construct
  source 1..21: mol_type = other RNA
  modified_base 6: mod_base = OTHER; note = 2-fluoro-modified nucleoside
  modified_base 9: mod_base = OTHER; note = 2-fluoro-modified nucleoside
  modified_base 11: mod_base = OTHER; note = 2-fluoro-modified nucleoside
  modified_base 1^2: mod_base = OTHER; note = phosphorothioate linkage
  modified_base 2^3: mod_base = OTHER; note = phosphorothioate linkage
  modified_base 19^20: mod_base = OTHER; note = phosphorothioate linkage
  modified_base 20^21: mod_base = OTHER; note = phosphorothioate linkage
tcggcatcgagaagtacaatt

SEQ ID NO: 4154 - RNA, 21 nt, synthetic construct
  source 1..21: mol_type = other RNA
  modified_base 6: mod_base = OTHER; note = 2-fluoro-modified nucleoside
  modified_base 9: mod_base = OTHER; note = 2-fluoro-modified nucleoside
  modified_base 10: mod_base = OTHER; note = 2-fluoro-modified nucleoside
  modified_base 1^2: mod_base = OTHER; note = phosphorothioate linkage
  modified_base 2^3: mod_base = OTHER; note = phosphorothioate linkage
  modified_base 19^20: mod_base = OTHER; note = phosphorothioate linkage
  modified_base 20^21: mod_base = OTHER; note = phosphorothioate linkage
tcggcatcgagaagtacaatt

SEQ ID NO: 4155 - RNA, 21 nt, synthetic construct
  source 1..21: mol_type = other RNA
  modified_base 8: mod_base = OTHER; note = 2-fluoro-modified nucleoside
  modified_base 9: mod_base = OTHER; note = 2-fluoro-modified nucleoside
  modified_base 11: mod_base = OTHER; note = 2-fluoro-modified nucleoside
  modified_base 1^2: mod_base = OTHER; note = phosphorothioate linkage
  modified_base 2^3: mod_base = OTHER; note = phosphorothioate linkage
  modified_base 19^20: mod_base = OTHER; note = phosphorothioate linkage
  modified_base 20^21: mod_base = OTHER; note = phosphorothioate linkage
atcgagaagtacatcccgatt

SEQ ID NO: 4156 - RNA, 21 nt, synthetic construct
  source 1..21: mol_type = other RNA
  modified_base 7: mod_base = OTHER; note = 2-fluoro-modified nucleoside
  modified_base 9: mod_base = OTHER; note = 2-fluoro-modified nucleoside
  modified_base 11: mod_base = OTHER; note = 2-fluoro-modified nucleoside
  modified_base 1^2: mod_base = OTHER; note = phosphorothioate linkage
  modified_base 2^3: mod_base = OTHER; note = phosphorothioate linkage
  modified_base 19^20: mod_base = OTHER; note = phosphorothioate linkage
  modified_base 20^21: mod_base = OTHER; note = phosphorothioate linkage
atcgagaagtacatcccgatt

SEQ ID NO: 4157 - RNA, 21 nt, synthetic construct
  source 1..21: mol_type = other RNA
  modified_base 6: mod_base = OTHER; note = 2-fluoro-modified nucleoside
  modified_base 9: mod_base = OTHER; note = 2-fluoro-modified nucleoside
  modified_base 11: mod_base = OTHER; note = 2-fluoro-modified nucleoside
  modified_base 1^2: mod_base = OTHER; note = phosphorothioate linkage
  modified_base 2^3: mod_base = OTHER; note = phosphorothioate linkage
  modified_base 19^20: mod_base = OTHER; note = phosphorothioate linkage
  modified_base 20^21: mod_base = OTHER; note = phosphorothioate linkage
atcgagaagtacatcccgatt

SEQ ID NO: 4158 - RNA, 21 nt, synthetic construct
  source 1..21: mol_type = other RNA
  modified_base 6: mod_base = OTHER; note = 2-fluoro-modified nucleoside
  modified_base 8: mod_base = OTHER; note = 2-fluoro-modified nucleoside
  modified_base 9: mod_base = OTHER; note = 2-fluoro-modified nucleoside
  modified_base 1^2: mod_base = OTHER; note = phosphorothioate linkage
  modified_base 2^3: mod_base = OTHER; note = phosphorothioate linkage
  modified_base 19^20: mod_base = OTHER; note = phosphorothioate linkage
  modified_base 20^21: mod_base = OTHER; note = phosphorothioate linkage
atcgagaagtacatcccgatt

SEQ ID NO: 4159 - RNA, 21 nt, synthetic construct
  source 1..21: mol_type = other RNA
  modified_base 6: mod_base = OTHER; note = 2-fluoro-modified nucleoside
  modified_base 8: mod_base = OTHER; note = 2-fluoro-modified nucleoside
  modified_base 9: mod_base = OTHER; note = 2-fluoro-modified nucleoside
  modified_base 11: mod_base = OTHER; note = 2-fluoro-modified nucleoside
  modified_base 1^2: mod_base = OTHER; note = phosphorothioate linkage
  modified_base 2^3: mod_base = OTHER; note = phosphorothioate linkage
  modified_base 19^20: mod_base = OTHER; note = phosphorothioate linkage
  modified_base 20^21: mod_base = OTHER; note = phosphorothioate linkage
atcgagaagtacatcccgatt

SEQ ID NO: 4160 - RNA, 21 nt, synthetic construct
  source 1..21: mol_type = other RNA
  modified_base 6: mod_base = OTHER; note = 2-fluoro-modified nucleoside
  modified_base 7: mod_base = OTHER; note = 2-fluoro-modified nucleoside
  modified_base 9: mod_base = OTHER; note = 2-fluoro-modified nucleoside
  modified_base 1^2: mod_base = OTHER; note = phosphorothioate linkage
  modified_base 2^3: mod_base = OTHER; note = phosphorothioate linkage
  modified_base 19^20: mod_base = OTHER; note = phosphorothioate linkage
  modified_base 20^21: mod_base = OTHER; note = phosphorothioate linkage
atcgagaagtacatcccgatt

SEQ ID NO: 4161 - RNA, 21 nt, synthetic construct
  source 1..21: mol_type = other RNA
  modified_base 6: mod_base = OTHER; note = 2-fluoro-modified nucleoside
  modified_base 7: mod_base = OTHER; note = 2-fluoro-modified nucleoside
  modified_base 9: mod_base = OTHER; note = 2-fluoro-modified nucleoside
  modified_base 11: mod_base = OTHER; note = 2-fluoro-modified nucleoside
  modified_base 1^2: mod_base = OTHER; note = phosphorothioate linkage
  modified_base 2^3: mod_base = OTHER; note = phosphorothioate linkage
  modified_base 19^20: mod_base = OTHER; note = phosphorothioate linkage
  modified_base 20^21: mod_base = OTHER; note = phosphorothioate linkage
atcgagaagtacatcccgatt

SEQ ID NO: 4162 - RNA, 21 nt, synthetic construct
  source 1..21: mol_type = other RNA
  modified_base 6: mod_base = OTHER; note = 2-fluoro-modified nucleoside
  modified_base 7: mod_base = OTHER; note = 2-fluoro-modified nucleoside
  modified_base 8: mod_base = OTHER; note = 2-fluoro-modified nucleoside
  modified_base 9: mod_base = OTHER; note = 2-fluoro-modified nucleoside
  modified_base 1^2: mod_base = OTHER; note = phosphorothioate linkage
  modified_base 2^3: mod_base = OTHER; note = phosphorothioate linkage
  modified_base 19^20: mod_base = OTHER; note = phosphorothioate linkage
  modified_base 20^21: mod_base = OTHER; note = phosphorothioate linkage
atcgagaagtacatcccgatt

SEQ ID NO: 4163 - RNA, 21 nt, synthetic construct
  source 1..21: mol_type = other RNA
  modified_base 6: mod_base = OTHER; note = 2-fluoro-modified nucleoside
  modified_base 7: mod_base = OTHER; note = 2-fluoro-modified nucleoside
  modified_base 8: mod_base = OTHER; note = 2-fluoro-modified nucleoside
  modified_base 9: mod_base = OTHER; note = 2-fluoro-modified nucleoside
  modified_base 1^2: mod_base = OTHER; note = phosphorothioate linkage
  modified_base 2^3: mod_base = OTHER; note = phosphorothioate linkage
  modified_base 19^20: mod_base = OTHER; note = phosphorothioate linkage
  modified_base 20^21: mod_base = OTHER; note = phosphorothioate linkage
atcgagaagtacatcccgatt

SEQ ID NO: 4164 - RNA, 21 nt, synthetic construct
  source 1..21: mol_type = other RNA
  modified_base 5: mod_base = OTHER; note = 2-fluoro-modified nucleoside
  modified_base 8: mod_base = OTHER; note = 2-fluoro-modified nucleoside
  modified_base 11: mod_base = OTHER; note = 2-fluoro-modified nucleoside
  modified_base 1^2: mod_base = OTHER; note = phosphorothioate linkage
  modified_base 2^3: mod_base = OTHER; note = phosphorothioate linkage
  modified_base 19^20: mod_base = OTHER; note = phosphorothioate linkage
  modified_base 20^21: mod_base = OTHER; note = phosphorothioate linkage
atcgagaagtacatcccgatt

SEQ ID NO: 4165 - RNA, 21 nt, synthetic construct
  source 1..21: mol_type = other RNA
  modified_base 5: mod_base = OTHER; note = 2-fluoro-modified nucleoside
  modified_base 8: mod_base = OTHER; note = 2-fluoro-modified nucleoside
  modified_base 9: mod_base = OTHER; note = 2-fluoro-modified nucleoside
  modified_base 1^2: mod_base = OTHER; note = phosphorothioate linkage
  modified_base 2^3: mod_base = OTHER; note = phosphorothioate linkage
  modified_base 19^20: mod_base = OTHER; note = phosphorothioate linkage
  modified_base 20^21: mod_base = OTHER; note = phosphorothioate linkage
  modified_base 1: mod_base = OTHER; note = 2-O-methyl modified nucleoside
  modified_base 2: mod_base = OTHER; note = 2-O-methyl modified nucleoside
  modified_base 3: mod_base = OTHER; note = 2-O-methyl modified nucleoside
atcgagaagtacatcccgatt

SEQ ID NO: 4166 - RNA, 21 nt, synthetic construct
  source 1..21: mol_type = other RNA
  modified_base 5: mod_base = OTHER; note = 2-fluoro-modified nucleoside
  modified_base 8: mod_base = OTHER; note = 2-fluoro-modified nucleoside
  modified_base 9: mod_base = OTHER; note = 2-fluoro-modified nucleoside
  modified_base 11: mod_base = OTHER; note = 2-fluoro-modified nucleoside
  modified_base 1^2: mod_base = OTHER; note = phosphorothioate linkage
  modified_base 2^3: mod_base = OTHER; note = phosphorothioate linkage
  modified_base 19^20: mod_base = OTHER; note = phosphorothioate linkage
  modified_base 20^21: mod_base = OTHER; note = phosphorothioate linkage
atcgagaagtacatcccgatt

SEQ ID NO: 4167 - RNA, 21 nt, synthetic construct
  source 1..21: mol_type = other RNA
  modified_base 5: mod_base = OTHER; note = 2-fluoro-modified nucleoside
  modified_base 7: mod_base = OTHER; note = 2-fluoro-modified nucleoside
  modified_base 9: mod_base = OTHER; note = 2-fluoro-modified nucleoside
  modified_base 1^2: mod_base = OTHER; note = phosphorothioate linkage
  modified_base 2^3: mod_base = OTHER; note = phosphorothioate linkage
  modified_base 19^20: mod_base = OTHER; note = phosphorothioate linkage
  modified_base 20^21: mod_base = OTHER; note = phosphorothioate linkage
  modified_base 1: mod_base = OTHER; note = 2-O-methyl modified nucleoside
  modified_base 19: mod_base = OTHER; note = 2-O-methyl modified nucleoside
  modified_base 20: mod_base = OTHER; note = 2-O-methyl modified nucleoside
  modified_base 21: mod_base = OTHER; note = 2-O-methyl modified nucleoside
atcgagaagtacatcccgatt

SEQ ID NO: 4168 - RNA, 21 nt, synthetic construct
  source 1..21: mol_type = other RNA
  modified_base 5: mod_base = OTHER; note = 2-fluoro-modified nucleoside
  modified_base 7: mod_base = OTHER; note = 2-fluoro-modified nucleoside
  modified_base 9: mod_base = OTHER; note = 2-fluoro-modified nucleoside
  modified_base 11: mod_base = OTHER; note = 2-fluoro-modified nucleoside
  modified_base 1^2: mod_base = OTHER; note = phosphorothioate linkage
  modified_base 2^3: mod_base = OTHER; note = phosphorothioate linkage
  modified_base 19^20: mod_base = OTHER; note = phosphorothioate linkage
  modified_base 20^21: mod_base = OTHER; note = phosphorothioate linkage
  modified_base 1: mod_base = OTHER; note = 2-O-methyl modified nucleoside
  modified_base 2: mod_base = OTHER; note = 2-O-methyl modified nucleoside
  modified_base 3: mod_base = OTHER; note = 2-O-methyl modified nucleoside
  modified_base 4: mod_base = OTHER; note = 2-O-methyl modified nucleoside
  modified_base 19: mod_base = OTHER; note = 2-O-methyl modified nucleoside
  modified_base 20: mod_base = OTHER; note = 2-O-methyl modified nucleoside
  modified_base 21: mod_base = OTHER; note = 2-O-methyl modified nucleoside
atcgagaagtacatcccgatt

SEQ ID NO: 4169 - RNA, 21 nt, synthetic construct
  source 1..21: mol_type = other RNA
  modified_base 5: mod_base = OTHER; note = 2-fluoro-modified nucleoside
  modified_base 6: mod_base = OTHER; note = 2-fluoro-modified nucleoside
  modified_base 9: mod_base = OTHER; note = 2-fluoro-modified nucleoside
  modified_base 1^2: mod_base = OTHER; note = phosphorothioate linkage
  modified_base 2^3: mod_base = OTHER; note = phosphorothioate linkage
  modified_base 19^20: mod_base = OTHER; note = phosphorothioate linkage
  modified_base 20^21: mod_base = OTHER; note = phosphorothioate linkage
  modified_base 1: mod_base = OTHER; note = 2-O-methyl modified nucleoside
  modified_base 2: mod_base = OTHER; note = 2-O-methyl modified nucleoside
  modified_base 3: mod_base = OTHER; note = 2-O-methyl modified nucleoside
  modified_base 4: mod_base = OTHER; note = 2-O-methyl modified nucleoside
  modified_base 19: mod_base = OTHER; note = 2-O-methyl modified nucleoside
  modified_base 20: mod_base = OTHER; note = 2-O-methyl modified nucleoside
atcgagaagtacatcccgatt

SEQ ID NO: 4170 - RNA, 21 nt, synthetic construct
  source 1..21: mol_type = other RNA
  modified_base 5: mod_base = OTHER; note = 2-fluoro-modified nucleoside
  modified_base 6: mod_base = OTHER; note = 2-fluoro-modified nucleoside
  modified_base 9: mod_base = OTHER; note = 2-fluoro-modified nucleoside
  modified_base 11: mod_base = OTHER; note = 2-fluoro-modified nucleoside
  modified_base 1^2: mod_base = OTHER; note = phosphorothioate linkage
  modified_base 2^3: mod_base = OTHER; note = phosphorothioate linkage
  modified_base 19^20: mod_base = OTHER; note = phosphorothioate linkage
  modified_base 20^21: mod_base = OTHER; note = phosphorothioate linkage
atcgagaagtacatcccgatt

SEQ ID NO: 4171 - RNA, 21 nt, synthetic construct
  source 1..21: mol_type = other RNA
  modified_base 5: mod_base = OTHER; note = 2-fluoro-modified nucleoside
  modified_base 6: mod_base = OTHER; note = 2-fluoro-modified nucleoside
  modified_base 8: mod_base = OTHER; note = 2-fluoro-modified nucleoside
  modified_base 9: mod_base = OTHER; note = 2-fluoro-modified nucleoside
  modified_base 1^2: mod_base = OTHER; note = phosphorothioate linkage
  modified_base 2^3: mod_base = OTHER; note = phosphorothioate linkage
  modified_base 19^20: mod_base = OTHER; note = phosphorothioate linkage
  modified_base 20^21: mod_base = OTHER; note = phosphorothioate linkage
atcgagaagtacatcccgatt

SEQ ID NO: 4172 - RNA, 21 nt, synthetic construct
  source 1..21: mol_type = other RNA
  modified_base 5: mod_base = OTHER; note = 2-fluoro-modified nucleoside
  modified_base 6: mod_base = OTHER; note = 2-fluoro-modified nucleoside
  modified_base 8: mod_base = OTHER; note = 2-fluoro-modified nucleoside
  modified_base 9: mod_base = OTHER; note = 2-fluoro-modified nucleoside
  modified_base 11: mod_base = OTHER; note = 2-fluoro-modified nucleoside
  modified_base 1^2: mod_base = OTHER; note = phosphorothioate linkage
  modified_base 2^3: mod_base = OTHER; note = phosphorothioate linkage
  modified_base 19^20: mod_base = OTHER; note = phosphorothioate linkage
  modified_base 20^21: mod_base = OTHER; note = phosphorothioate linkage
atcgagaagtacatcccgatt

SEQ ID NO: 4173 - RNA, 21 nt, synthetic construct
  source 1..21: mol_type = other RNA
  modified_base 5: mod_base = OTHER; note = 2-fluoro-modified nucleoside
  modified_base 6: mod_base = OTHER; note = 2-fluoro-modified nucleoside
  modified_base 7: mod_base = OTHER; note = 2-fluoro-modified nucleoside
  modified_base 8: mod_base = OTHER; note = 2-fluoro-modified nucleoside
  modified_base 1^2: mod_base = OTHER; note = phosphorothioate linkage
  modified_base 2^3: mod_base = OTHER; note = phosphorothioate linkage
  modified_base 19^20: mod_base = OTHER; note = phosphorothioate linkage
  modified_base 20^21: mod_base = OTHER; note = phosphorothioate linkage
  modified_base 19: mod_base = OTHER; note = 2-O-methyl modified nucleoside
  modified_base 20: mod_base = OTHER; note = 2-O-methyl modified nucleoside
  modified_base 1: mod_base = OTHER; note = 2-O-methyl modified nucleoside
  modified_base 3: mod_base = OTHER; note = 2-O-methyl modified nucleoside
atcgagaagtacatcccgatt

SEQ ID NO: 4174 - RNA, 21 nt, synthetic construct
  source 1..21: mol_type = other RNA
  modified_base 9: mod_base = OTHER; note = 2-fluoro-modified nucleoside
  modified_base 11: mod_base = OTHER; note = 2-fluoro-modified nucleoside
  modified_base 1^2: mod_base = OTHER; note = phosphorothioate linkage
  modified_base 2^3: mod_base = OTHER; note = phosphorothioate linkage
  modified_base 19^20: mod_base = OTHER; note = phosphorothioate linkage
  modified_base 20^21: mod_base = OTHER; note = phosphorothioate linkage
  modified_base 1: mod_base = OTHER; note = 2-O-methyl modified nucleoside
  modified_base 2: mod_base = OTHER; note = 2-O-methyl modified nucleoside
  modified_base 3: mod_base = OTHER; note = 2-O-methyl modified nucleoside
  modified_base 19: mod_base = OTHER; note = 2-O-methyl modified nucleoside
  modified_base 20: mod_base = OTHER; note = 2-O-methyl modified nucleoside
  modified_base 21: mod_base = OTHER; note = 2-O-methyl modified nucleoside
tcgagaagtacatcccgtatt

SEQ ID NO: 4175 - RNA, 21 nt, synthetic construct
  source 1..21: mol_type = other RNA
  modified_base 7: mod_base = OTHER; note = 2-fluoro-modified nucleoside
  modified_base 9: mod_base = OTHER; note = 2-fluoro-modified nucleoside
  modified_base 11: mod_base = OTHER; note = 2-fluoro-modified nucleoside
  modified_base 1^2: mod_base = OTHER; note = phosphorothioate linkage
  modified_base 2^3: mod_base = OTHER; note = phosphorothioate linkage
  modified_base 19^20: mod_base = OTHER; note = phosphorothioate linkage
  modified_base 20^21: mod_base = OTHER; note = phosphorothioate linkage
  modified_base 19: mod_base = OTHER; note = 2-O-methyl modified nucleoside
  modified_base 20: mod_base = OTHER; note = 2-O-methyl modified nucleoside
  modified_base 21: mod_base = OTHER; note = 2-O-methyl modified nucleoside
  modified_base 1: mod_base = OTHER; note = 2-O-methyl modified nucleoside
  modified_base 2: mod_base = OTHER; note = 2-O-methyl modified nucleoside
cgagaagtacatcccgtaatt

SEQ ID NO: 4176 - RNA, 21 nt, synthetic construct
  source 1..21: mol_type = other RNA
  modified_base 6: mod_base = OTHER; note = 2-fluoro-modified nucleoside
  modified_base 9: mod_base = OTHER; note = 2-fluoro-modified nucleoside
  modified_base 11: mod_base = OTHER; note = 2-fluoro-modified nucleoside
  modified_base 1^2: mod_base = OTHER; note = phosphorothioate linkage
  modified_base 2^3: mod_base = OTHER; note = phosphorothioate linkage
  modified_base 19^20: mod_base = OTHER; note = phosphorothioate linkage
  modified_base 20^21: mod_base = OTHER; note = phosphorothioate linkage
  modified_base 1: mod_base = OTHER; note = 2-O-methyl modified nucleoside
  modified_base 2: mod_base = OTHER; note = 2-O-methyl modified nucleoside
  modified_base 3: mod_base = OTHER; note = 2-O-methyl modified nucleoside
  modified_base 19: mod_base = OTHER; note = 2-O-methyl modified nucleoside
  modified_base 20: mod_base = OTHER; note = 2-O-methyl modified nucleoside
  modified_base 21: mod_base = OTHER; note = 2-O-methyl modified nucleoside
cgagaagtacatcccgtaatt

SEQ ID NO: 4177 - RNA, 21 nt, synthetic construct
  source 1..21: mol_type = other RNA
  modified_base 6: mod_base = OTHER; note = 2-fluoro-modified nucleoside
  modified_base 7: mod_base = OTHER; note = 2-fluoro-modified nucleoside
  modified_base 9: mod_base = OTHER; note = 2-fluoro-modified nucleoside
  modified_base 1^2: mod_base = OTHER; note = phosphorothioate linkage
  modified_base 2^3: mod_base = OTHER; note = phosphorothioate linkage
  modified_base 19^20: mod_base = OTHER; note = phosphorothioate linkage
  modified_base 20^21: mod_base = OTHER; note = phosphorothioate linkage
  modified_base 20: mod_base = OTHER; note = 2-O-methyl modified nucleoside
  modified_base 19: mod_base = OTHER; note = 2-O-methyl modified nucleoside
  modified_base 21: mod_base = OTHER; note = 2-O-methyl modified nucleoside
  modified_base 1: mod_base = OTHER; note = 2-O-methyl modified nucleoside
  modified_base 3: mod_base = OTHER; note = 2-O-methyl modified nucleoside
cgagaagtacatcccgtaatt

SEQ ID NO: 4178 - RNA, 21 nt, synthetic construct
  source 1..21: mol_type = other RNA
  modified_base 6: mod_base = OTHER; note = 2-fluoro-modified nucleoside
  modified_base 7: mod_base = OTHER; note = 2-fluoro-modified nucleoside
  modified_base 9: mod_base = OTHER; note = 2-fluoro-modified nucleoside
  modified_base 11: mod_base = OTHER; note = 2-fluoro-modified nucleoside
  modified_base 1^2: mod_base = OTHER; note = phosphorothioate linkage
  modified_base 2^3: mod_base = OTHER; note = phosphorothioate linkage
  modified_base 19^20: mod_base = OTHER; note = phosphorothioate linkage
  modified_base 20^21: mod_base = OTHER; note = phosphorothioate linkage
  modified_base 19: mod_base = OTHER; note = 2-O-methyl modified nucleoside
  modified_base 20: mod_base = OTHER; note = 2-O-methyl modified nucleoside
  modified_base 21: mod_base = OTHER; note = 2-O-methyl modified nucleoside
cgagaagtacatcccgtaatt

SEQ ID NO: 4179 - RNA, 21 nt, synthetic construct
  source 1..21: mol_type = other RNA
  modified_base 5: mod_base = OTHER; note = 2-fluoro-modified nucleoside
  modified_base 9: mod_base = OTHER; note = 2-fluoro-modified nucleoside
  modified_base 11: mod_base = OTHER; note = 2-fluoro-modified nucleoside
  modified_base 1^2: mod_base = OTHER; note = phosphorothioate linkage
  modified_base 2^3: mod_base = OTHER; note = phosphorothioate linkage
  modified_base 19^20: mod_base = OTHER; note = phosphorothioate linkage
  modified_base 20^21: mod_base = OTHER; note = phosphorothioate linkage
  modified_base 20: mod_base = OTHER; note = 2-O-methyl modified nucleoside
  modified_base 21: mod_base = OTHER; note = 2-O-methyl modified nucleoside
  modified_base 19: mod_base = OTHER; note = 2-O-methyl modified nucleoside
  modified_base 1: mod_base = OTHER; note = 2-O-methyl modified nucleoside
  modified_base 2: mod_base = OTHER; note = 2-O-methyl modified nucleoside
  modified_base 3: mod_base = OTHER; note = 2-O-methyl modified nucleoside
  modified_base 17: mod_base = OTHER; note = 2-O-methyl modified nucleoside
  modified_base 15: mod_base = OTHER; note = 2-O-methyl modified nucleoside
cgagaagtacatcccgtaatt

SEQ ID NO: 4180 - RNA, 21 nt, synthetic construct
  source 1..21: mol_type = other RNA
  modified_base 5: mod_base = OTHER; note = 2-fluoro-modified nucleoside
  modified_base 7: mod_base = OTHER; note = 2-fluoro-modified nucleoside
  modified_base 9: mod_base = OTHER; note = 2-fluoro-modified nucleoside
  modified_base 1^2: mod_base = OTHER; note = phosphorothioate linkage
  modified_base 2^3: mod_base = OTHER; note = phosphorothioate linkage
  modified_base 19^20: mod_base = OTHER; note = phosphorothioate linkage
  modified_base 20^21: mod_base = OTHER; note = phosphorothioate linkage
  modified_base 1: mod_base = OTHER; note = 2-O-methyl modified nucleoside
  modified_base 2: mod_base = OTHER; note = 2-O-methyl modified nucleoside
  modified_base 3: mod_base = OTHER; note = 2-O-methyl modified nucleoside
  modified_base 4: mod_base = OTHER; note = 2-O-methyl modified nucleoside
  modified_base 19: mod_base = OTHER; note = 2-O-methyl modified nucleoside
  modified_base 21: mod_base = OTHER; note = 2-O-methyl modified nucleoside
cgagaagtacatcccgtaatt

SEQ ID NO: 4181 - RNA, 21 nt, synthetic construct
  source 1..21: mol_type = other RNA
  modified_base 5: mod_base = OTHER; note = 2-fluoro-modified nucleoside
  modified_base 7: mod_base = OTHER; note = 2-fluoro-modified nucleoside
  modified_base 9: mod_base = OTHER; note = 2-fluoro-modified nucleoside
  modified_base 11: mod_base = OTHER; note = 2-fluoro-modified nucleoside
  modified_base 1^2: mod_base = OTHER; note = phosphorothioate linkage
  modified_base 2^3: mod_base = OTHER; note = phosphorothioate linkage
  modified_base 19^20: mod_base = OTHER; note = phosphorothioate linkage
  modified_base 20^21: mod_base = OTHER; note = phosphorothioate linkage
cgagaagtacatcccgtaatt

SEQ ID NO: 4182 - RNA, 21 nt, synthetic construct
  source 1..21: mol_type = other RNA
  modified_base 5: mod_base = OTHER; note = 2-fluoro-modified nucleoside
  modified_base 6: mod_base = OTHER; note = 2-fluoro-modified nucleoside
  modified_base 9: mod_base = OTHER; note = 2-fluoro-modified nucleoside
  modified_base 1^2: mod_base = OTHER; note = phosphorothioate linkage
  modified_base 2^3: mod_base = OTHER; note = phosphorothioate linkage
  modified_base 19^20: mod_base = OTHER; note = phosphorothioate linkage
  modified_base 20^21: mod_base = OTHER; note = phosphorothioate linkage
cgagaagtacatcccgtaatt

SEQ ID NO: 4183 - RNA, 21 nt, synthetic construct
  source 1..21: mol_type = other RNA
  modified_base 5: mod_base = OTHER; note = 2-fluoro-modified nucleoside
  modified_base 6: mod_base = OTHER; note = 2-fluoro-modified nucleoside
  modified_base 9: mod_base = OTHER; note = 2-fluoro-modified nucleoside
  modified_base 11: mod_base = OTHER; note = 2-fluoro-modified nucleoside
  modified_base 1^2: mod_base = OTHER; note = phosphorothioate linkage
  modified_base 2^3: mod_base = OTHER; note = phosphorothioate linkage
  modified_base 19^20: mod_base = OTHER; note = phosphorothioate linkage
  modified_base 20^21: mod_base = OTHER; note = phosphorothioate linkage
cgagaagtacatcccgtaatt

SEQ ID NO: 4184 - RNA, 21 nt, synthetic construct
  source 1..21: mol_type = other RNA
  modified_base 7: mod_base = OTHER; note = 2-fluoro-modified nucleoside
  modified_base 9: mod_base = OTHER; note = 2-fluoro-modified nucleoside
  modified_base 11: mod_base = OTHER; note = 2-fluoro-modified nucleoside
  modified_base 1^2: mod_base = OTHER; note = phosphorothioate linkage
  modified_base 2^3: mod_base = OTHER; note = phosphorothioate linkage
  modified_base 19^20: mod_base = OTHER; note = phosphorothioate linkage
  modified_base 20^21: mod_base = OTHER; note = phosphorothioate linkage
gaagtacatcccgtacacatt

SEQ ID NO: 4185 - RNA, 21 nt, synthetic construct
  source 1..21: mol_type = other RNA
  modified_base 7: mod_base = OTHER; note = 2-fluoro-modified nucleoside
  modified_base 9: mod_base = OTHER; note = 2-fluoro-modified nucleoside
  modified_base 10: mod_base = OTHER; note = 2-fluoro-modified nucleoside
  modified_base 1^2: mod_base = OTHER; note = phosphorothioate linkage
  modified_base 2^3: mod_base = OTHER; note = phosphorothioate linkage
  modified_base 19^20: mod_base = OTHER; note = phosphorothioate linkage
  modified_base 20^21: mod_base = OTHER; note = phosphorothioate linkage
  modified_base 1: mod_base = OTHER; note = 2-O-methyl modified nucleoside
  modified_base 19: mod_base = OTHER; note = 2-O-methyl modified nucleoside
  modified_base 15: mod_base = OTHER; note = 2-O-methyl modified nucleoside
  modified_base 14: mod_base = OTHER; note = 2-O-methyl modified nucleoside
gaagtacatcccgtacacatt

SEQ ID NO: 4186 - RNA, 21 nt, synthetic construct
  source 1..21: mol_type = other RNA
  modified_base 5: mod_base = OTHER; note = 2-fluoro-modified nucleoside
  modified_base 9: mod_base = OTHER; note = 2-fluoro-modified nucleoside
  modified_base 11: mod_base = OTHER; note = 2-fluoro-modified nucleoside
  modified_base 1^2: mod_base = OTHER; note = phosphorothioate linkage
  modified_base 2^3: mod_base = OTHER; note = phosphorothioate linkage
  modified_base 19^20: mod_base = OTHER; note = phosphorothioate linkage
  modified_base 20^21: mod_base = OTHER; note = phosphorothioate linkage
gaagtacatcccgtacacatt

SEQ ID NO: 4187 - RNA, 21 nt, synthetic construct
  source 1..21: mol_type = other RNA
  modified_base 5: mod_base = OTHER; note = 2-fluoro-modified nucleoside
  modified_base 9: mod_base = OTHER; note = 2-fluoro-modified nucleoside
  modified_base 10: mod_base = OTHER; note = 2-fluoro-modified nucleoside
  modified_base 1^2: mod_base = OTHER; note = phosphorothioate linkage
  modified_base 2^3: mod_base = OTHER; note = phosphorothioate linkage
  modified_base 19^20: mod_base = OTHER; note = phosphorothioate linkage
  modified_base 20^21: mod_base = OTHER; note = phosphorothioate linkage
gaagtacatcccgtacacatt

SEQ ID NO: 4188 - RNA, 21 nt, synthetic construct
  source 1..21: mol_type = other RNA
  modified_base 5: mod_base = OTHER; note = 2-fluoro-modified nucleoside
  modified_base 7: mod_base = OTHER; note = 2-fluoro-modified nucleoside
  modified_base 9: mod_base = OTHER; note = 2-fluoro-modified nucleoside
  modified_base 1^2: mod_base = OTHER; note = phosphorothioate linkage
  modified_base 2^3: mod_base = OTHER; note = phosphorothioate linkage
  modified_base 19^20: mod_base = OTHER; note = phosphorothioate linkage
  modified_base 20^21: mod_base = OTHER; note = phosphorothioate linkage
gaagtacatcccgtacacatt

SEQ ID NO: 4189 - RNA, 21 nt, synthetic construct
  source 1..21: mol_type = other RNA
  modified_base 5: mod_base = OTHER; note = 2-fluoro-modified nucleoside
  modified_base 7: mod_base = OTHER; note = 2-fluoro-modified nucleoside
  modified_base 9: mod_base = OTHER; note = 2-fluoro-modified nucleoside
  modified_base 11: mod_base = OTHER; note = 2-fluoro-modified nucleoside
  modified_base 1^2: mod_base = OTHER; note = phosphorothioate linkage
  modified_base 2^3: mod_base = OTHER; note = phosphorothioate linkage
  modified_base 19^20: mod_base = OTHER; note = phosphorothioate linkage
  modified_base 20^21: mod_base = OTHER; note = phosphorothioate linkage
gaagtacatcccgtacacatt

SEQ ID NO: 4190 - RNA, 21 nt, synthetic construct
  source 1..21: mol_type = other RNA
  modified_base 5: mod_base = OTHER; note = 2-fluoro-modified nucleoside
  modified_base 7: mod_base = OTHER; note = 2-fluoro-modified nucleoside
  modified_base 9: mod_base = OTHER; note = 2-fluoro-modified nucleoside
  modified_base 10: mod_base = OTHER; note = 2-fluoro-modified nucleoside
  modified_base 1^2: mod_base = OTHER; note = phosphorothioate linkage
  modified_base 2^3: mod_base = OTHER; note = phosphorothioate linkage
  modified_base 19^20: mod_base = OTHER; note = phosphorothioate linkage
  modified_base 20^21: mod_base = OTHER; note = phosphorothioate linkage
gaagtacatcccgtacacatt

SEQ ID NO: 4191 - RNA, 21 nt, synthetic construct
  source 1..21: mol_type = other RNA
  modified_base 8: mod_base = OTHER; note = 2-fluoro-modified nucleoside
  modified_base 9: mod_base = OTHER; note = 2-fluoro-modified nucleoside
  modified_base 11: mod_base = OTHER; note = 2-fluoro-modified nucleoside
  modified_base 1^2: mod_base = OTHER; note = phosphorothioate linkage
  modified_base 2^3: mod_base = OTHER; note = phosphorothioate linkage
  modified_base 19^20: mod_base = OTHER; note = phosphorothioate linkage
  modified_base 20^21: mod_base = OTHER; note = phosphorothioate linkage
ggacacaagtgccagattatt

SEQ ID NO: 4192 - RNA, 21 nt, synthetic construct
  source 1..21: mol_type = other RNA
  modified_base 7: mod_base = OTHER; note = 2-fluoro-modified nucleoside
  modified_base 9: mod_base = OTHER; note = 2-fluoro-modified nucleoside
  modified_base 11: mod_base = OTHER; note = 2-fluoro-modified nucleoside
  modified_base 1^2: mod_base = OTHER; note = phosphorothioate linkage
  modified_base 2^3: mod_base = OTHER; note = phosphorothioate linkage
  modified_base 19^20: mod_base = OTHER; note = phosphorothioate linkage
  modified_base 20^21: mod_base = OTHER; note = phosphorothioate linkage
ggacacaagtgccagattatt

SEQ ID NO: 4193 - RNA, 21 nt, synthetic construct
  source 1..21: mol_type = other RNA
  modified_base 5: mod_base = OTHER; note = 2-fluoro-modified nucleoside
  modified_base 9: mod_base = OTHER; note = 2-fluoro-modified nucleoside
  modified_base 11: mod_base = OTHER; note = 2-fluoro-modified nucleoside
  modified_base 1^2: mod_base = OTHER; note = phosphorothioate linkage
  modified_base 2^3: mod_base = OTHER; note = phosphorothioate linkage
  modified_base 19^20: mod_base = OTHER; note = phosphorothioate linkage
  modified_base 20^21: mod_base = OTHER; note = phosphorothioate linkage
  modified_base 1: mod_base = OTHER; note = 2-O-methyl modified nucleoside
  modified_base 2: mod_base = OTHER; note = 2-O-methyl modified nucleoside
  modified_base 3: mod_base = OTHER; note = 2-O-methyl modified nucleoside
  modified_base 16: mod_base = OTHER; note = 2-O-methyl modified nucleoside
  modified_base 15: mod_base = OTHER; note = 2-O-methyl modified nucleoside
  modified_base 20: mod_base = OTHER; note = 2-O-methyl modified nucleoside
ggacacaagtgccagattatt

SEQ ID NO: 4194 - RNA, 21 nt, synthetic construct
  source 1..21: mol_type = other RNA
  modified_base 5: mod_base = OTHER; note = 2-fluoro-modified nucleoside
  modified_base 8: mod_base = OTHER; note = 2-fluoro-modified nucleoside
  modified_base 9: mod_base = OTHER; note = 2-fluoro-modified nucleoside
  modified_base 1^2: mod_base = OTHER; note = phosphorothioate linkage
  modified_base 2^3: mod_base = OTHER; note = phosphorothioate linkage
  modified_base 19^20: mod_base = OTHER; note = phosphorothioate linkage
  modified_base 20^21: mod_base = OTHER; note = phosphorothioate linkage
ggacacaagtgccagattatt

SEQ ID NO: 4195 - RNA, 21 nt, synthetic construct
  source 1..21: mol_type = other RNA
  modified_base 5: mod_base = OTHER; note = 2-fluoro-modified nucleoside
  modified_base 8: mod_base = OTHER; note = 2-fluoro-modified nucleoside
  modified_base 9: mod_base = OTHER; note = 2-fluoro-modified nucleoside
  modified_base 11: mod_base = OTHER; note = 2-fluoro-modified nucleoside
  modified_base 1^2: mod_base = OTHER; note = phosphorothioate linkage
  modified_base 2^3: mod_base = OTHER; note = phosphorothioate linkage
  modified_base 19^20: mod_base = OTHER; note = phosphorothioate linkage
  modified_base 20^21: mod_base = OTHER; note = phosphorothioate linkage
ggacacaagtgccagattatt

SEQ ID NO: 4196 - RNA, 21 nt, synthetic construct
  source 1..21: mol_type = other RNA
  modified_base 5: mod_base = OTHER; note = 2-fluoro-modified nucleoside
  modified_base 7: mod_base = OTHER; note = 2-fluoro-modified nucleoside
  modified_base 9: mod_base = OTHER; note = 2-fluoro-modified nucleoside
  modified_base 1^2: mod_base = OTHER; note = phosphorothioate linkage
  modified_base 2^3: mod_base = OTHER; note = phosphorothioate linkage
  modified_base 19^20: mod_base = OTHER; note = phosphorothioate linkage
  modified_base 20^21: mod_base = OTHER; note = phosphorothioate linkage
  modified_base 1: mod_base = OTHER; note = 2-O-methyl modified nucleoside
  modified_base 2: mod_base = OTHER; note = 2-O-methyl modified nucleoside
  modified_base 19: mod_base = OTHER; note = 2-O-methyl modified nucleoside
  modified_base 20: mod_base = OTHER; note = 2-O-methyl modified nucleoside
ggacacaagtgccagattatt

SEQ ID NO: 4197 - RNA, 21 nt, synthetic construct
  source 1..21: mol_type = other RNA
  modified_base 5: mod_base = OTHER; note = 2-fluoro-modified nucleoside
  modified_base 7: mod_base = OTHER; note = 2-fluoro-modified nucleoside
  modified_base 9: mod_base = OTHER; note = 2-fluoro-modified nucleoside
  modified_base 11: mod_base = OTHER; note = 2-fluoro-modified nucleoside
  modified_base 1^2: mod_base = OTHER; note = phosphorothioate linkage
  modified_base 2^3: mod_base = OTHER; note = phosphorothioate linkage
  modified_base 19^20: mod_base = OTHER; note = phosphorothioate linkage
  modified_base 20^21: mod_base = OTHER; note = phosphorothioate linkage
ggacacaagtgccagattatt

SEQ ID NO: 4198 - RNA, 21 nt, synthetic construct
  source 1..21: mol_type = other RNA
  modified_base 6: mod_base = OTHER; note = 2-fluoro-modified nucleoside
  modified_base 7: mod_base = OTHER; note = 2-fluoro-modified nucleoside
  modified_base 9: mod_base = OTHER; note = 2-fluoro-modified nucleoside
  modified_base 1^2: mod_base = OTHER; note = phosphorothioate linkage
  modified_base 2^3: mod_base = OTHER; note = phosphorothioate linkage
  modified_base 19^20: mod_base = OTHER; note = phosphorothioate linkage
  modified_base 20^21: mod_base = OTHER; note = phosphorothioate linkage
acacaagtgccagattgcatt

SEQ ID NO: 4199 - RNA, 21 nt, synthetic construct
  source 1..21: mol_type = other RNA
  modified_base 5: mod_base = OTHER; note = 2-fluoro-modified nucleoside
  modified_base 7: mod_base = OTHER; note = 2-fluoro-modified nucleoside
  modified_base 9: mod_base = OTHER; note = 2-fluoro-modified nucleoside
  modified_base 1^2: mod_base = OTHER; note = phosphorothioate linkage
  modified_base 2^3: mod_base = OTHER; note = phosphorothioate linkage
  modified_base 19^20: mod_base = OTHER; note = phosphorothioate linkage
  modified_base 20^21: mod_base = OTHER; note = phosphorothioate linkage
  modified_base 1: mod_base = OTHER; note = 2-O-methyl modified nucleoside
  modified_base 2: mod_base = OTHER; note = 2-O-methyl modified nucleoside
  modified_base 3: mod_base = OTHER; note = 2-O-methyl modified nucleoside
  modified_base 19: mod_base = OTHER; note = 2-O-methyl modified nucleoside
acacaagtgccagattgcatt

SEQ ID NO: 4200 - RNA, 21 nt, synthetic construct
  source 1..21: mol_type = other RNA
  modified_base 5: mod_base = OTHER; note = 2-fluoro-modified nucleoside
  modified_base 6: mod_base = OTHER; note = 2-fluoro-modified nucleoside
  modified_base 9: mod_base = OTHER; note = 2-fluoro-modified nucleoside
  modified_base 1^2: mod_base = OTHER; note = phosphorothioate linkage
  modified_base 2^3: mod_base = OTHER; note = phosphorothioate linkage
  modified_base 19^20: mod_base = OTHER; note = phosphorothioate linkage
  modified_base 20^21: mod_base = OTHER; note = phosphorothioate linkage
acacaagtgccagattgcatt

SEQ ID NO: 4201 - RNA, 21 nt, synthetic construct
  source 1..21: mol_type = other RNA
  modified_base 9: mod_base = OTHER; note = 2-fluoro-modified nucleoside
  modified_base 10: mod_base = OTHER; note = 2-fluoro-modified nucleoside
  modified_base 1^2: mod_base = OTHER; note = phosphorothioate linkage
  modified_base 2^3: mod_base = OTHER; note = phosphorothioate linkage
  modified_base 19^20: mod_base = OTHER; note = phosphorothioate linkage
  modified_base 20^21: mod_base = OTHER; note = phosphorothioate linkage
gctacttcgactgcaagtatt

SEQ ID NO: 4202 - RNA, 21 nt, synthetic construct
  source 1..21: mol_type = other RNA
  modified_base 8: mod_base = OTHER; note = 2-fluoro-modified nucleoside
  modified_base 9: mod_base = OTHER; note = 2-fluoro-modified nucleoside
  modified_base 1^2: mod_base = OTHER; note = phosphorothioate linkage
  modified_base 2^3: mod_base = OTHER; note = phosphorothioate linkage
  modified_base 19^20: mod_base = OTHER; note = phosphorothioate linkage
  modified_base 20^21: mod_base = OTHER; note = phosphorothioate linkage
ctacttcgactgcaagtcatt

SEQ ID NO: 4203 - RNA, 21 nt, synthetic construct
  source 1..21: mol_type = other RNA
  modified_base 8: mod_base = OTHER; note = 2-fluoro-modified nucleoside
  modified_base 9: mod_base = OTHER; note = 2-fluoro-modified nucleoside
  modified_base 11: mod_base = OTHER; note = 2-fluoro-modified nucleoside
  modified_base 1^2: mod_base = OTHER; note = phosphorothioate linkage
  modified_base 2^3: mod_base = OTHER; note = phosphorothioate linkage
  modified_base 19^20: mod_base = OTHER; note = phosphorothioate linkage
  modified_base 20^21: mod_base = OTHER; note = phosphorothioate linkage
acttcgactgcaagtccgatt

SEQ ID NO: 4204 - RNA, 21 nt, synthetic construct
  source 1..21: mol_type = other RNA
  modified_base 5: mod_base = OTHER; note = 2-fluoro-modified nucleoside
  modified_base 8: mod_base = OTHER; note = 2-fluoro-modified nucleoside
  modified_base 11: mod_base = OTHER; note = 2-fluoro-modified nucleoside
  modified_base 1^2: mod_base = OTHER; note = phosphorothioate linkage
  modified_base 2^3: mod_base = OTHER; note = phosphorothioate linkage
  modified_base 19^20: mod_base = OTHER; note = phosphorothioate linkage
  modified_base 20^21: mod_base = OTHER; note = phosphorothioate linkage
acttcgactgcaagtccgatt

SEQ ID NO: 4205 - RNA, 21 nt, synthetic construct
  source 1..21: mol_type = other RNA
  modified_base 5: mod_base = OTHER; note = 2-fluoro-modified nucleoside
  modified_base 8: mod_base = OTHER; note = 2-fluoro-modified nucleoside
  modified_base 9: mod_base = OTHER; note = 2-fluoro-modified nucleoside
  modified_base 1^2: mod_base = OTHER; note = phosphorothioate linkage
  modified_base 2^3: mod_base = OTHER; note = phosphorothioate linkage
  modified_base 19^20: mod_base = OTHER; note = phosphorothioate linkage
  modified_base 20^21: mod_base = OTHER; note = phosphorothioate linkage
acttcgactgcaagtccgatt

SEQ ID NO: 4206 - RNA, 21 nt, synthetic construct
  source 1..21: mol_type = other RNA
  modified_base 5: mod_base = OTHER; note = 2-fluoro-modified nucleoside
  modified_base 8: mod_base = OTHER; note = 2-fluoro-modified nucleoside
  modified_base 9: mod_base = OTHER; note = 2-fluoro-modified nucleoside
  modified_base 11: mod_base = OTHER; note = 2-fluoro-modified nucleoside
  modified_base 1^2: mod_base = OTHER; note = phosphorothioate linkage
  modified_base 2^3: mod_base = OTHER; note = phosphorothioate linkage
  modified_base 19^20: mod_base = OTHER; note = phosphorothioate linkage
  modified_base 20^21: mod_base = OTHER; note = phosphorothioate linkage
acttcgactgcaagtccgatt

SEQ ID NO: 4207 - RNA, 21 nt, synthetic construct
  source 1..21: mol_type = other RNA
  modified_base 9: mod_base = OTHER; note = 2-fluoro-modified nucleoside
  modified_base 11: mod_base = OTHER; note = 2-fluoro-modified nucleoside
  modified_base 1^2: mod_base = OTHER; note = phosphorothioate linkage
  modified_base 2^3: mod_base = OTHER; note = phosphorothioate linkage
  modified_base 19^20: mod_base = OTHER; note = phosphorothioate linkage
  modified_base 20^21: mod_base = OTHER; note = phosphorothioate linkage
ttacctctacggcatcatatt

SEQ ID NO: 4208 - RNA, 21 nt, synthetic construct
  source 1..21: mol_type = other RNA
  modified_base 2: mod_base = OTHER; note = 2-fluoro-modified nucleoside
  modified_base 4: mod_base = OTHER; note = 2-fluoro-modified nucleoside
  modified_base 6: mod_base = OTHER; note = 2-fluoro-modified nucleoside
  modified_base 8: mod_base = OTHER; note = 2-fluoro-modified nucleoside
  modified_base 10: mod_base = OTHER; note = 2-fluoro-modified nucleoside
  modified_base 12: mod_base = OTHER; note = 2-fluoro-modified nucleoside
  modified_base 14: mod_base = OTHER; note = 2-fluoro-modified nucleoside
  modified_base 16: mod_base = OTHER; note = 2-fluoro-modified nucleoside
  modified_base 18: mod_base = OTHER; note = 2-fluoro-modified nucleoside
  modified_base 1^2: mod_base = OTHER; note = phosphorothioate linkage
  modified_base 2^3: mod_base = OTHER; note = phosphorothioate linkage
  modified_base 19^20: mod_base = OTHER; note = phosphorothioate linkage
  modified_base 20^21: mod_base = OTHER; note = phosphorothioate linkage
tttaggttctggggactcctt

SEQ ID NO: 4209 - RNA, 21 nt, synthetic construct
  source 1..21: mol_type = other RNA
  modified_base 2: mod_base = OTHER; note = 2-fluoro-modified nucleoside
  modified_base 4: mod_base = OTHER; note = 2-fluoro-modified nucleoside
  modified_base 6: mod_base = OTHER; note = 2-fluoro-modified nucleoside
  modified_base 8: mod_base = OTHER; note = 2-fluoro-modified nucleoside
  modified_base 10: mod_base = OTHER; note = 2-fluoro-modified nucleoside
  modified_base 12: mod_base = OTHER; note = 2-fluoro-modified nucleoside
  modified_base 14: mod_base = OTHER; note = 2-fluoro-modified nucleoside
  modified_base 16: mod_base = OTHER; note = 2-fluoro-modified nucleoside
  modified_base 18: mod_base = OTHER; note = 2-fluoro-modified nucleoside
  modified_base 1^2: mod_base = OTHER; note = phosphorothioate linkage
  modified_base 2^3: mod_base = OTHER; note = phosphorothioate linkage
  modified_base 19^20: mod_base = OTHER; note = phosphorothioate linkage
  modified_base 20^21: mod_base = OTHER; note = phosphorothioate linkage
tgtggcattaggttctgggtt

SEQ ID NO: 4210 - RNA, 21 nt, synthetic construct
  source 1..21: mol_type = other RNA
  modified_base 2: mod_base = OTHER; note = 2-fluoro-modified nucleoside
  modified_base 4: mod_base = OTHER; note = 2-fluoro-modified nucleoside
  modified_base 6: mod_base = OTHER; note = 2-fluoro-modified nucleoside
  modified_base 8: mod_base = OTHER; note = 2-fluoro-modified nucleoside
  modified_base 10: mod_base = OTHER; note = 2-fluoro-modified nucleoside
  modified_base 12: mod_base = OTHER; note = 2-fluoro-modified nucleoside
  modified_base 14: mod_base = OTHER; note = 2-fluoro-modified nucleoside
  modified_base 16: mod_base = OTHER; note = 2-fluoro-modified nucleoside
  modified_base 18: mod_base = OTHER; note = 2-fluoro-modified nucleoside
  modified_base 1^2: mod_base = OTHER; note = phosphorothioate linkage
  modified_base 2^3: mod_base = OTHER; note = phosphorothioate linkage
  modified_base 19^20: mod_base = OTHER; note = phosphorothioate linkage
  modified_base 20^21: mod_base = OTHER; note = phosphorothioate linkage
tgaggtcaccaggatagtgtt

SEQ ID NO: 4211 - RNA, 21 nt, synthetic construct
  source 1..21: mol_type = other RNA
  modified_base 2: mod_base = OTHER; note = 2-fluoro-modified nucleoside
  modified_base 4: mod_base = OTHER; note = 2-fluoro-modified nucleoside
  modified_base 6: mod_base = OTHER; note = 2-fluoro-modified nucleoside
  modified_base 8: mod_base = OTHER; note = 2-fluoro-modified nucleoside
  modified_base 10: mod_base = OTHER; note = 2-fluoro-modified nucleoside
  modified_base 12: mod_base = OTHER; note = 2-fluoro-modified nucleoside
  modified_base 14: mod_base = OTHER; note = 2-fluoro-modified nucleoside
  modified_base 16: mod_base = OTHER; note = 2-fluoro-modified nucleoside
  modified_base 18: mod_base = OTHER; note = 2-fluoro-modified nucleoside
  modified_base 1^2: mod_base = OTHER; note = phosphorothioate linkage
  modified_base 2^3: mod_base = OTHER; note = phosphorothioate linkage
  modified_base 19^20: mod_base = OTHER; note = phosphorothioate linkage
  modified_base 20^21: mod_base = OTHER; note = phosphorothioate linkage
tagaggtcaccaggatagttt

SEQ ID NO: 4212 - RNA, 21 nt, synthetic construct
  source 1..21: mol_type = other RNA
  modified_base 2: mod_base = OTHER; note = 2-fluoro-modified nucleoside
  modified_base 4: mod_base = OTHER; note = 2-fluoro-modified nucleoside
  modified_base 6: mod_base = OTHER; note = 2-fluoro-modified nucleoside
  modified_base 8: mod_base = OTHER; note = 2-fluoro-modified nucleoside
  modified_base 10: mod_base = OTHER; note = 2-fluoro-modified nucleoside
  modified_base 12: mod_base = OTHER; note = 2-fluoro-modified nucleoside
  modified_base 14: mod_base = OTHER; note = 2-fluoro-modified nucleoside
  modified_base 16: mod_base = OTHER; note = 2-fluoro-modified nucleoside
  modified_base 18: mod_base = OTHER; note = 2-fluoro-modified nucleoside
  modified_base 1^2: mod_base = OTHER; note = phosphorothioate linkage
  modified_base 2^3: mod_base = OTHER; note = phosphorothioate linkage
  modified_base 19^20: mod_base = OTHER; note = phosphorothioate linkage
  modified_base 20^21: mod_base = OTHER; note = phosphorothioate linkage
tgttgtgagttgtggcacatt

SEQ ID NO: 4213 - RNA, 21 nt, synthetic construct
  source 1..21: mol_type = other RNA
  modified_base 2: mod_base = OTHER; note = 2-fluoro-modified nucleoside
  modified_base 4: mod_base = OTHER; note = 2-fluoro-modified nucleoside
  modified_base 6: mod_base = OTHER; note = 2-fluoro-modified nucleoside
  modified_base 8: mod_base = OTHER; note = 2-fluoro-modified nucleoside
  modified_base 10: mod_base = OTHER; note = 2-fluoro-modified nucleoside
  modified_base 12: mod_base = OTHER; note = 2-fluoro-modified nucleoside
  modified_base 14: mod_base = OTHER; note = 2-fluoro-modified nucleoside
  modified_base 16: mod_base = OTHER; note = 2-fluoro-modified nucleoside
  modified_base 18: mod_base = OTHER; note = 2-fluoro-modified nucleoside
  modified_base 1^2: mod_base = OTHER; note = phosphorothioate linkage
  modified_base 2^3: mod_base = OTHER; note = phosphorothioate linkage
  modified_base 19^20: mod_base = OTHER; note = phosphorothioate linkage
  modified_base 20^21: mod_base = OTHER; note = phosphorothioate linkage
tgtagttgtgagttgtggctt

SEQ ID NO: 4214 - RNA, 21 nt, synthetic construct
  source 1..21: mol_type = other RNA
  modified_base 2: mod_base = OTHER; note = 2-fluoro-modified nucleoside
  modified_base 4: mod_base = OTHER; note = 2-fluoro-modified nucleoside
  modified_base 6: mod_base = OTHER; note = 2-fluoro-modified nucleoside
  modified_base 8: mod_base = OTHER; note = 2-fluoro-modified nucleoside
  modified_base 10: mod_base = OTHER; note = 2-fluoro-modified nucleoside
  modified_base 12: mod_base = OTHER; note = 2-fluoro-modified nucleoside
  modified_base 14: mod_base = OTHER; note = 2-fluoro-modified nucleoside
  modified_base 16: mod_base = OTHER; note = 2-fluoro-modified nucleoside
  modified_base 18: mod_base = OTHER; note = 2-fluoro-modified nucleoside
  modified_base 1^2: mod_base = OTHER; note = phosphorothioate linkage
  modified_base 2^3: mod_base = OTHER; note = phosphorothioate linkage
  modified_base 19^20: mod_base = OTHER; note = phosphorothioate linkage
  modified_base 20^21: mod_base = OTHER; note = phosphorothioate linkage
ttcgtagttgtgagttgtgtt

SEQ ID NO: 4215 - RNA, 21 nt, synthetic construct
  source 1..21: mol_type = other RNA
  modified_base 2: mod_base = OTHER; note = 2-fluoro-modified nucleoside
  modified_base 4: mod_base = OTHER; note = 2-fluoro-modified nucleoside
  modified_base 6: mod_base = OTHER; note = 2-fluoro-modified nucleoside
  modified_base 8: mod_base = OTHER; note = 2-fluoro-modified nucleoside
  modified_base 10: mod_base = OTHER; note = 2-fluoro-modified nucleoside
  modified_base 12: mod_base = OTHER; note = 2-fluoro-modified nucleoside
  modified_base 14: mod_base = OTHER; note = 2-fluoro-modified nucleoside
  modified_base 16: mod_base = OTHER; note = 2-fluoro-modified nucleoside
  modified_base 18: mod_base = OTHER; note = 2-fluoro-modified nucleoside
  modified_base 1^2: mod_base = OTHER; note = phosphorothioate linkage
  modified_base 2^3: mod_base = OTHER; note = phosphorothioate linkage
  modified_base 19^20: mod_base = OTHER; note = phosphorothioate linkage
  modified_base 20^21: mod_base = OTHER; note = phosphorothioate linkage
ttcgtagttgtgagttgtgtt

SEQ ID NO: 4216 - RNA, 21 nt, synthetic construct
  source 1..21: mol_type = other RNA
  modified_base 2: mod_base = OTHER; note = 2-fluoro-modified nucleoside
  modified_base 4: mod_base = OTHER; note = 2-fluoro-modified nucleoside
  modified_base 6: mod_base = OTHER; note = 2-fluoro-modified nucleoside
  modified_base 8: mod_base = OTHER; note = 2-fluoro-modified nucleoside
  modified_base 10: mod_base = OTHER; note = 2-fluoro-modified nucleoside
  modified_base 12: mod_base = OTHER; note = 2-fluoro-modified nucleoside
  modified_base 14: mod_base = OTHER; note = 2-fluoro-modified nucleoside
  modified_base 16: mod_base = OTHER; note = 2-fluoro-modified nucleoside
  modified_base 18: mod_base = OTHER; note = 2-fluoro-modified nucleoside
  modified_base 1^2: mod_base = OTHER; note = phosphorothioate linkage
  modified_base 2^3: mod_base = OTHER; note = phosphorothioate linkage
  modified_base 19^20: mod_base = OTHER; note = phosphorothioate linkage
  modified_base 20^21: mod_base = OTHER; note = phosphorothioate linkage
tggtcgtagttgtgagttgtt

SEQ ID NO: 4217 - RNA, 21 nt, synthetic construct
  source 1..21: mol_type = other RNA
  modified_base 2: mod_base = OTHER; note = 2-fluoro-modified nucleoside
  modified_base 4: mod_base = OTHER; note = 2-fluoro-modified nucleoside
  modified_base 6: mod_base = OTHER; note = 2-fluoro-modified nucleoside
  modified_base 8: mod_base = OTHER; note = 2-fluoro-modified nucleoside
  modified_base 10: mod_base = OTHER; note = 2-fluoro-modified nucleoside
  modified_base 12: mod_base = OTHER; note = 2-fluoro-modified nucleoside
  modified_base 14: mod_base = OTHER; note = 2-fluoro-modified nucleoside
  modified_base 16: mod_base = OTHER; note = 2-fluoro-modified nucleoside
  modified_base 18: mod_base = OTHER; note = 2-fluoro-modified nucleoside
  modified_base 1^2: mod_base = OTHER; note = phosphorothioate linkage
  modified_base 2^3: mod_base = OTHER; note = phosphorothioate linkage
  modified_base 19^20: mod_base = OTHER; note = phosphorothioate linkage
  modified_base 20^21: mod_base = OTHER; note = phosphorothioate linkage
tcaagctgtatgtcgggtgtt

SEQ ID NO: 4218 - RNA, 21 nt, synthetic construct
  source 1..21: mol_type = other RNA
  modified_base 2: mod_base = OTHER; note = 2-fluoro-modified nucleoside
  modified_base 4: mod_base = OTHER; note = 2-fluoro-modified nucleoside
  modified_base 6: mod_base = OTHER; note = 2-fluoro-modified nucleoside
  modified_base 8: mod_base = OTHER; note = 2-fluoro-modified nucleoside
  modified_base 10: mod_base = OTHER; note = 2-fluoro-modified nucleoside
  modified_base 12: mod_base = OTHER; note = 2-fluoro-modified nucleoside
  modified_base 14: mod_base = OTHER; note = 2-fluoro-modified nucleoside
  modified_base 16: mod_base = OTHER; note = 2-fluoro-modified nucleoside
  modified_base 18: mod_base = OTHER; note = 2-fluoro-modified nucleoside
  modified_base 1^2: mod_base = OTHER; note = phosphorothioate linkage
  modified_base 2^3: mod_base = OTHER; note = phosphorothioate linkage
  modified_base 19^20: mod_base = OTHER; note = phosphorothioate linkage
  modified_base 20^21: mod_base = OTHER; note = phosphorothioate linkage
tagaagcagcgctcatcagtt

SEQ ID NO: 4219 - RNA, 21 nt, synthetic construct
  source 1..21: mol_type = other RNA
  modified_base 2: mod_base = OTHER; note = 2-fluoro-modified nucleoside
  modified_base 4: mod_base = OTHER; note = 2-fluoro-modified nucleoside
  modified_base 6: mod_base = OTHER; note = 2-fluoro-modified nucleoside
  modified_base 8: mod_base = OTHER; note = 2-fluoro-modified nucleoside
  modified_base 10: mod_base = OTHER; note = 2-fluoro-modified nucleoside
  modified_base 12: mod_base = OTHER; note = 2-fluoro-modified nucleoside
  modified_base 14: mod_base = OTHER; note = 2-fluoro-modified nucleoside
  modified_base 16: mod_base = OTHER; note = 2-fluoro-modified nucleoside
  modified_base 18: mod_base = OTHER; note = 2-fluoro-modified nucleoside
  modified_base 1^2: mod_base = OTHER; note = phosphorothioate linkage
  modified_base 2^3: mod_base = OTHER; note = phosphorothioate linkage
  modified_base 19^20: mod_base = OTHER; note = phosphorothioate linkage
  modified_base 20^21: mod_base = OTHER; note = phosphorothioate linkage
tgcggttgaagaagtgctgtt

SEQ ID NO: 4220 - RNA, 21 nt, synthetic construct
  source 1..21: mol_type = other RNA
  modified_base 2: mod_base = OTHER; note = 2-fluoro-modified nucleoside
  modified_base 4: mod_base = OTHER; note = 2-fluoro-modified nucleoside
  modified_base 6: mod_base = OTHER; note = 2-fluoro-modified nucleoside
  modified_base 10: mod_base = OTHER; note = 2-fluoro-modified nucleoside
  modified_base 12: mod_base = OTHER; note = 2-fluoro-modified nucleoside
  modified_base 12: mod_base = OTHER; note = 2-fluoro-modified nucleoside
  modified_base 14: mod_base = OTHER; note = 2-fluoro-modified nucleoside
  modified_base 16: mod_base = OTHER; note = 2-fluoro-modified nucleoside
  modified_base 18: mod_base = OTHER; note = 2-fluoro-modified nucleoside
  modified_base 1^2: mod_base = OTHER; note = phosphorothioate linkage
  modified_base 2^3: mod_base = OTHER; note = phosphorothioate linkage
  modified_base 19^20: mod_base = OTHER; note = phosphorothioate linkage
  modified_base 20^21: mod_base = OTHER; note = phosphorothioate linkage
ttcgtgcggttgaagaagttt

SEQ ID NO: 4221 - RNA, 21 nt, synthetic construct
  source 1..21: mol_type = other RNA
  modified_base 2: mod_base = OTHER; note = 2-fluoro-modified nucleoside
  modified_base 4: mod_base = OTHER; note = 2-fluoro-modified nucleoside
  modified_base 6: mod_base = OTHER; note = 2-fluoro-modified nucleoside
  modified_base 8: mod_base = OTHER; note = 2-fluoro-modified nucleoside
  modified_base 10: mod_base = OTHER; note = 2-fluoro-modified nucleoside
  modified_base 12: mod_base = OTHER; note = 2-fluoro-modified nucleoside
  modified_base 14: mod_base = OTHER; note = 2-fluoro-modified nucleoside
  modified_base 16: mod_base = OTHER; note = 2-fluoro-modified nucleoside
  modified_base 18: mod_base = OTHER; note = 2-fluoro-modified nucleoside
  modified_base 19^20: mod_base = OTHER; note = phosphorothioate linkage
  modified_base 20^21: mod_base = OTHER; note = phosphorothioate linkage
  modified_base 1^2: mod_base = OTHER; note = phosphorothioate linkage
  modified_base 2^3: mod_base = OTHER; note = phosphorothioate linkage
tcttctcgatgccgaaggttt

SEQ ID NO: 4222 - RNA, 21 nt, synthetic construct
  source 1..21: mol_type = other RNA
  modified_base 2: mod_base = OTHER; note = 2-fluoro-modified nucleoside
  modified_base 4: mod_base = OTHER; note = 2-fluoro-modified nucleoside
  modified_base 6: mod_base = OTHER; note = 2-fluoro-modified nucleoside
  modified_base 8: mod_base = OTHER; note = 2-fluoro-modified nucleoside
  modified_base 10: mod_base = OTHER; note = 2-fluoro-modified nucleoside
  modified_base 12: mod_base = OTHER; note = 2-fluoro-modified nucleoside
  modified_base 14: mod_base = OTHER; note = 2-fluoro-modified nucleoside
  modified_base 16: mod_base = OTHER; note = 2-fluoro-modified nucleoside
  modified_base 18: mod_base = OTHER; note = 2-fluoro-modified nucleoside
  modified_base 1^2: mod_base = OTHER; note = phosphorothioate linkage
  modified_base 2^3: mod_base = OTHER; note = phosphorothioate linkage
  modified_base 19^20: mod_base = OTHER; note = phosphorothioate linkage
  modified_base 20^21: mod_base = OTHER; note = phosphorothioate linkage
tgtacttctcgatgccgaatt

SEQ ID NO: 4223 - RNA, 21 nt, synthetic construct
  source 1..21: mol_type = other RNA
  modified_base 2: mod_base = OTHER; note = 2-fluoro-modified nucleoside
  modified_base 4: mod_base = OTHER; note = 2-fluoro-modified nucleoside
  modified_base 6: mod_base = OTHER; note = 2-fluoro-modified nucleoside
  modified_base 8: mod_base = OTHER; note = 2-fluoro-modified nucleoside
  modified_base 10: mod_base = OTHER; note = 2-fluoro-modified nucleoside
  modified_base 12: mod_base = OTHER; note = 2-fluoro-modified nucleoside
  modified_base 14: mod_base = OTHER; note = 2-fluoro-modified nucleoside
  modified_base 16: mod_base = OTHER; note = 2-fluoro-modified nucleoside
  modified_base 18: mod_base = OTHER; note = 2-fluoro-modified nucleoside
  modified_base 1^2: mod_base = OTHER; note = phosphorothioate linkage
  modified_base 2^3: mod_base = OTHER; note = phosphorothioate linkage
  modified_base 19^20: mod_base = OTHER; note = phosphorothioate linkage
  modified_base 20^21: mod_base = OTHER; note = phosphorothioate linkage
ttgtacttctcgatgccgatt

SEQ ID NO: 4224 - RNA, 21 nt, synthetic construct
  source 1..21: mol_type = other RNA
  modified_base 2: mod_base = OTHER; note = 2-fluoro-modified nucleoside
  modified_base 4: mod_base = OTHER; note = 2-fluoro-modified nucleoside
  modified_base 6: mod_base = OTHER; note = 2-fluoro-modified nucleoside
  modified_base 8: mod_base = OTHER; note = 2-fluoro-modified nucleoside
  modified_base 10: mod_base = OTHER; note = 2-fluoro-modified nucleoside
  modified_base 12: mod_base = OTHER; note = 2-fluoro-modified nucleoside
  modified_base 14: mod_base = OTHER; note = 2-fluoro-modified nucleoside
  modified_base 16: mod_base = OTHER; note = 2-fluoro-modified nucleoside
  modified_base 18: mod_base = OTHER; note = 2-fluoro-modified nucleoside
  modified_base 1^2: mod_base = OTHER; note = phosphorothioate linkage
  modified_base 2^3: mod_base = OTHER; note = phosphorothioate linkage
  modified_base 19^20: mod_base = OTHER; note = phosphorothioate linkage
  modified_base 20^21: mod_base = OTHER; note = phosphorothioate linkage
tcgggatgtacttctcgattt

SEQ ID NO: 4225 - RNA, 21 nt, synthetic construct
  source 1..21: mol_type = other RNA
  modified_base 2: mod_base = OTHER; note = 2-fluoro-modified nucleoside
  modified_base 4: mod_base = OTHER; note = 2-fluoro-modified nucleoside
  modified_base 6: mod_base = OTHER; note = 2-fluoro-modified nucleoside
  modified_base 8: mod_base = OTHER; note = 2-fluoro-modified nucleoside
  modified_base 10: mod_base = OTHER; note = 2-fluoro-modified nucleoside
  modified_base 12: mod_base = OTHER; note = 2-fluoro-modified nucleoside
  modified_base 14: mod_base = OTHER; note = 2-fluoro-modified nucleoside
  modified_base 16: mod_base = OTHER; note = 2-fluoro-modified nucleoside
  modified_base 18: mod_base = OTHER; note = 2-fluoro-modified nucleoside
  modified_base 1^2: mod_base = OTHER; note = phosphorothioate linkage
  modified_base 2^3: mod_base = OTHER; note = phosphorothioate linkage
  modified_base 19^20: mod_base = OTHER; note = phosphorothioate linkage
  modified_base 20^21: mod_base = OTHER; note = phosphorothioate linkage
tacgggatgtacttctcgatt

SEQ ID NO: 4226 - RNA, 21 nt, synthetic construct
  source 1..21: mol_type = other RNA
  modified_base 2: mod_base = OTHER; note = 2-fluoro-modified nucleoside
  modified_base 4: mod_base = OTHER; note = 2-fluoro-modified nucleoside
  modified_base 6: mod_base = OTHER; note = 2-fluoro-modified nucleoside
  modified_base 8: mod_base = OTHER; note = 2-fluoro-modified nucleoside
  modified_base 10: mod_base = OTHER; note = 2-fluoro-modified nucleoside
  modified_base 12: mod_base = OTHER; note = 2-fluoro-modified nucleoside
  modified_base 14: mod_base = OTHER; note = 2-fluoro-modified nucleoside
  modified_base 16: mod_base = OTHER; note = 2-fluoro-modified nucleoside
  modified_base 18: mod_base = OTHER; note = 2-fluoro-modified nucleoside
  modified_base 1^2: mod_base = OTHER; note = phosphorothioate linkage
  modified_base 2^3: mod_base = OTHER; note = phosphorothioate linkage
  modified_base 19^20: mod_base = OTHER; note = phosphorothioate linkage
  modified_base 20^21: mod_base = OTHER; note = phosphorothioate linkage
ttacgggatgtacttctcgtt

SEQ ID NO: 4227 - RNA, 21 nt, synthetic construct
  source 1..21: mol_type = other RNA
  modified_base 2: mod_base = OTHER; note = 2-fluoro-modified nucleoside
  modified_base 4: mod_base = OTHER; note = 2-fluoro-modified nucleoside
  modified_base 6: mod_base = OTHER; note = 2-fluoro-modified nucleoside
  modified_base 8: mod_base = OTHER; note = 2-fluoro-modified nucleoside
  modified_base 10: mod_base = OTHER; note = 2-fluoro-modified nucleoside
  modified_base 12: mod_base = OTHER; note = 2-fluoro-modified nucleoside
  modified_base 14: mod_base = OTHER; note = 2-fluoro-modified nucleoside
  modified_base 16: mod_base = OTHER; note = 2-fluoro-modified nucleoside
  modified_base 18: mod_base = OTHER; note = 2-fluoro-modified nucleoside
  modified_base 1^2: mod_base = OTHER; note = phosphorothioate linkage
  modified_base 2^3: mod_base = OTHER; note = phosphorothioate linkage
  modified_base 19^20: mod_base = OTHER; note = phosphorothioate linkage
  modified_base 20^21: mod_base = OTHER; note = phosphorothioate linkage
tgtgtacgggatgtacttctt

SEQ ID NO: 4228 - RNA, 21 nt, synthetic construct
  source 1..21: mol_type = other RNA
  modified_base 2: mod_base = OTHER; note = 2-fluoro-modified nucleoside
  modified_base 4: mod_base = OTHER; note = 2-fluoro-modified nucleoside
  modified_base 6: mod_base = OTHER; note = 2-fluoro-modified nucleoside
  modified_base 8: mod_base = OTHER; note = 2-fluoro-modified nucleoside
  modified_base 10: mod_base = OTHER; note = 2-fluoro-modified nucleoside
  modified_base 12: mod_base = OTHER; note = 2-fluoro-modified nucleoside
  modified_base 14: mod_base = OTHER; note = 2-fluoro-modified nucleoside
  modified_base 16: mod_base = OTHER; note = 2-fluoro-modified nucleoside
  modified_base 18: mod_base = OTHER; note = 2-fluoro-modified nucleoside
  modified_base 1^2: mod_base = OTHER; note = phosphorothioate linkage
  modified_base 2^3: mod_base = OTHER; note = phosphorothioate linkage
  modified_base 19^20: mod_base = OTHER; note = phosphorothioate linkage
  modified_base 20^21: mod_base = OTHER; note = phosphorothioate linkage
taatctggcacttgtgtcctt

SEQ ID NO: 4229 - RNA, 21 nt, synthetic construct
  source 1..21: mol_type = other RNA
  modified_base 2: mod_base = OTHER; note = 2-fluoro-modified nucleoside
  modified_base 4: mod_base = OTHER; note = 2-fluoro-modified nucleoside
  modified_base 6: mod_base = OTHER; note = 2-fluoro-modified nucleoside
  modified_base 8: mod_base = OTHER; note = 2-fluoro-modified nucleoside
  modified_base 10: mod_base = OTHER; note = 2-fluoro-modified nucleoside
  modified_base 12: mod_base = OTHER; note = 2-fluoro-modified nucleoside
  modified_base 14: mod_base = OTHER; note = 2-fluoro-modified nucleoside
  modified_base 16: mod_base = OTHER; note = 2-fluoro-modified nucleoside
  modified_base 18: mod_base = OTHER; note = 2-fluoro-modified nucleoside
  modified_base 1^2: mod_base = OTHER; note = phosphorothioate linkage
  modified_base 2^3: mod_base = OTHER; note = phosphorothioate linkage
  modified_base 19^20: mod_base = OTHER; note = phosphorothioate linkage
  modified_base 20^21: mod_base = OTHER; note = phosphorothioate linkage
tgcaatctggcacttgtgttt

SEQ ID NO: 4230 - RNA, 21 nt, synthetic construct
  source 1..21: mol_type = other RNA
  modified_base 2: mod_base = OTHER; note = 2-fluoro-modified nucleoside
  modified_base 4: mod_base = OTHER; note = 2-fluoro-modified nucleoside
  modified_base 6: mod_base = OTHER; note = 2-fluoro-modified nucleoside
  modified_base 8: mod_base = OTHER; note = 2-fluoro-modified nucleoside
  modified_base 10: mod_base = OTHER; note = 2-fluoro-modified nucleoside
  modified_base 12: mod_base = OTHER; note = 2-fluoro-modified nucleoside
  modified_base 14: mod_base = OTHER; note = 2-fluoro-modified nucleoside
  modified_base 16: mod_base = OTHER; note = 2-fluoro-modified nucleoside
  modified_base 18: mod_base = OTHER; note = 2-fluoro-modified nucleoside
  modified_base 1^2: mod_base = OTHER; note = phosphorothioate linkage
  modified_base 2^3: mod_base = OTHER; note = phosphorothioate linkage
  modified_base 19^20: mod_base = OTHER; note = phosphorothioate linkage
  modified_base 20^21: mod_base = OTHER; note = phosphorothioate linkage
tacttgcagtcgaagtagctt

SEQ ID NO: 4231 - RNA, 21 nt, synthetic construct
  source 1..21: mol_type = other RNA
  modified_base 2: mod_base = OTHER; note = 2-fluoro-modified nucleoside
  modified_base 4: mod_base = OTHER; note = 2-fluoro-modified nucleoside
  modified_base 6: mod_base = OTHER; note = 2-fluoro-modified nucleoside
  modified_base 8: mod_base = OTHER; note = 2-fluoro-modified nucleoside
  modified_base 10: mod_base = OTHER; note = 2-fluoro-modified nucleoside
  modified_base 12: mod_base = OTHER; note = 2-fluoro-modified nucleoside
  modified_base 14: mod_base = OTHER; note = 2-fluoro-modified nucleoside
  modified_base 16: mod_base = OTHER; note = 2-fluoro-modified nucleoside
  modified_base 18: mod_base = OTHER; note = 2-fluoro-modified nucleoside
  modified_base 1^2: mod_base = OTHER; note = phosphorothioate linkage
  modified_base 2^3: mod_base = OTHER; note = phosphorothioate linkage
  modified_base 19^20: mod_base = OTHER; note = phosphorothioate linkage
  modified_base 20^21: mod_base = OTHER; note = phosphorothioate linkage
tgacttgcagtcgaagtagtt

SEQ ID NO: 4232 - RNA, 21 nt, synthetic construct
  source 1..21: mol_type = other RNA
  modified_base 2: mod_base = OTHER; note = 2-fluoro-modified nucleoside
  modified_base 4: mod_base = OTHER; note = 2-fluoro-modified nucleoside
  modified_base 6: mod_base = OTHER; note = 2-fluoro-modified nucleoside
  modified_base 8: mod_base = OTHER; note = 2-fluoro-modified nucleoside
  modified_base 10: mod_base = OTHER; note = 2-fluoro-modified nucleoside
  modified_base 12: mod_base = OTHER; note = 2-fluoro-modified nucleoside
  modified_base 14: mod_base = OTHER; note = 2-fluoro-modified nucleoside
  modified_base 16: mod_base = OTHER; note = 2-fluoro-modified nucleoside
  modified_base 18: mod_base = OTHER; note = 2-fluoro-modified nucleoside
  modified_base 1^2: mod_base = OTHER; note = phosphorothioate linkage
  modified_base 2^3: mod_base = OTHER; note = phosphorothioate linkage
  modified_base 19^20: mod_base = OTHER; note = phosphorothioate linkage
  modified_base 20^21: mod_base = OTHER; note = phosphorothioate linkage
tcggacttgcagtcgaagttt

SEQ ID NO: 4233 - RNA, 21 nt, synthetic construct
  source 1..21: mol_type = other RNA
  modified_base 2: mod_base = OTHER; note = 2-fluoro-modified nucleoside
  modified_base 4: mod_base = OTHER; note = 2-fluoro-modified nucleoside
  modified_base 6: mod_base = OTHER; note = 2-fluoro-modified nucleoside
  modified_base 8: mod_base = OTHER; note = 2-fluoro-modified nucleoside
  modified_base 10: mod_base = OTHER; note = 2-fluoro-modified nucleoside
  modified_base 12: mod_base = OTHER; note = 2-fluoro-modified nucleoside
  modified_base 14: mod_base = OTHER; note = 2-fluoro-modified nucleoside
  modified_base 16: mod_base = OTHER; note = 2-fluoro-modified nucleoside
  modified_base 18: mod_base = OTHER; note = 2-fluoro-modified nucleoside
  modified_base 1^2: mod_base = OTHER; note = phosphorothioate linkage
  modified_base 2^3: mod_base = OTHER; note = phosphorothioate linkage
  modified_base 19^20: mod_base = OTHER; note = phosphorothioate linkage
  modified_base 20^21: mod_base = OTHER; note = phosphorothioate linkage
tatgatgccgtagaggtaatt

SEQ ID NO: 4234 - RNA, 21 nt, synthetic construct
  source 1..21: mol_type = other RNA
  modified_base 6: mod_base = OTHER; note = 2-fluoro-modified nucleoside
  modified_base 7: mod_base = OTHER; note = 2-fluoro-modified nucleoside
  modified_base 9: mod_base = OTHER; note = 2-fluoro-modified nucleoside
  modified_base 19^20: mod_base = OTHER; note = phosphorothioate linkage
  modified_base 20^21: mod_base = OTHER; note = phosphorothioate linkage
  modified_base 1: mod_base = OTHER; note = 2-O-methyl modified nucleoside
  modified_base 2: mod_base = OTHER; note = 2-O-methyl modified nucleoside
  modified_base 4: mod_base = OTHER; note = 2-O-methyl modified nucleoside
  modified_base 11: mod_base = OTHER; note = 2-O-methyl modified nucleoside
  modified_base 14: mod_base = OTHER; note = 2-O-methyl modified nucleoside
  modified_base 16: mod_base = OTHER; note = 2-O-methyl modified nucleoside
  modified_base 19: mod_base = OTHER; note = 2-O-methyl modified nucleoside
aacctaatgccacagcgaatt

SEQ ID NO: 4235 - DNA, 21 bp, synthetic construct
  misc_feature 9: note = DNA
  source 1..21: mol_type = other DNA
  misc_feature 1..8: note = RNA
  misc_feature 10..21: note = RNA
  modified_base 1..4: mod_base = OTHER; note = 2-O-methyl modified nucleoside
  modified_base 5: mod_base = OTHER; note = 2-fluoro-modified nucleoside
  modified_base 6: mod_base = OTHER; note = 2-O-methyl modified nucleoside
  modified_base 7..8: mod_base = OTHER; note = 2-fluoro-modified nucleoside
  modified_base 10: mod_base = OTHER; note = 2-fluoro-modified nucleoside
  modified_base 11..21: mod_base = OTHER; note = 2-O-methyl modified nucleoside
  modified_base 19..21: mod_base = OTHER; note = phosphorothioate linkage
actatcctggtgacctctatt

SEQ ID NO: 4236 - RNA, 21 nt, synthetic construct
  source 1..21: mol_type = other RNA
  modified_base 8: mod_base = OTHER; note = 2-fluoro-modified nucleoside
  modified_base 9: mod_base = OTHER; note = 2-fluoro-modified nucleoside
  modified_base 11: mod_base = OTHER; note = 2-fluoro-modified nucleoside
  modified_base 19^20: mod_base = OTHER; note = phosphorothioate linkage
  modified_base 20^21: mod_base = OTHER; note = phosphorothioate linkage
  modified_base 1: mod_base = OTHER; note = 2-O-methyl modified nucleoside
  modified_base 2: mod_base = OTHER; note = 2-O-methyl modified nucleoside
  modified_base 3: mod_base = OTHER; note = 2-O-methyl modified nucleoside
  modified_base 19: mod_base = OTHER; note = 2-O-methyl modified nucleoside
  modified_base 20: mod_base = OTHER; note = 2-O-methyl modified nucleoside
tggtgtgccacaactcacatt

SEQ ID NO: 4237 - RNA, 21 nt, synthetic construct
  source 1..21: mol_type = other RNA
  modified_base 6: mod_base = OTHER; note = 2-fluoro-modified nucleoside
  modified_base 9: mod_base = OTHER; note = 2-fluoro-modified nucleoside
  modified_base 11: mod_base = OTHER; note = 2-fluoro-modified nucleoside
  modified_base 19^20: mod_base = OTHER; note = phosphorothioate linkage
  modified_base 20^21: mod_base = OTHER; note = phosphorothioate linkage
tggtgtgccacaactcacatt

SEQ ID NO: 4238 - RNA, 21 nt, synthetic construct
  source 1..21: mol_type = other RNA
  modified_base 6: mod_base = OTHER; note = 2-fluoro-modified nucleoside
  modified_base 8: mod_base = OTHER; note = 2-fluoro-modified nucleoside
  modified_base 9: mod_base = OTHER; note = 2-fluoro-modified nucleoside
  modified_base 19^20: mod_base = OTHER; note = phosphorothioate linkage
  modified_base 20^21: mod_base = OTHER; note = phosphorothioate linkage
  modified_base 1: mod_base = OTHER; note = 2-O-methyl modified nucleoside
  modified_base 2: mod_base = OTHER; note = 2-O-methyl modified nucleoside
  modified_base 3: mod_base = OTHER; note = 2-O-methyl modified nucleoside
  modified_base 19: mod_base = OTHER; note = 2-O-methyl modified nucleoside
  modified_base 20: mod_base = OTHER; note = 2-O-methyl modified nucleoside
  modified_base 15: mod_base = OTHER; note = 2-O-methyl modified nucleoside
tggtgtgccacaactcacatt

SEQ ID NO: 4239 - RNA, 21 nt, synthetic construct
  source 1..21: mol_type = other RNA
  modified_base 6: mod_base = OTHER; note = 2-fluoro-modified nucleoside
  modified_base 8: mod_base = OTHER; note = 2-fluoro-modified nucleoside
  modified_base 9: mod_base = OTHER; note = 2-fluoro-modified nucleoside
  modified_base 11: mod_base = OTHER; note = 2-fluoro-modified nucleoside
  modified_base 19^20: mod_base = OTHER; note = phosphorothioate linkage
  modified_base 20^21: mod_base = OTHER; note = phosphorothioate linkage
  modified_base 1: mod_base = OTHER; note = 2-O-methyl modified nucleoside
  modified_base 2: mod_base = OTHER; note = 2-O-methyl modified nucleoside
  modified_base 3: mod_base = OTHER; note = 2-O-methyl modified nucleoside
  modified_base 4: mod_base = OTHER; note = 2-O-methyl modified nucleoside
  modified_base 15: mod_base = OTHER; note = 2-O-methyl modified nucleoside
  modified_base 17: mod_base = OTHER; note = 2-O-methyl modified nucleoside
tggtgtgccacaactcacatt

SEQ ID NO: 4240 - RNA, 21 nt, synthetic construct
  source 1..21: mol_type = other RNA
  modified_base 6: mod_base = OTHER; note = 2-fluoro-modified nucleoside
  modified_base 8: mod_base = OTHER; note = 2-fluoro-modified nucleoside
  modified_base 9: mod_base = OTHER; note = 2-fluoro-modified nucleoside
  modified_base 19^20: mod_base = OTHER; note = phosphorothioate linkage
  modified_base 20^21: mod_base = OTHER; note = phosphorothioate linkage
  modified_base 1: mod_base = OTHER; note = 2-O-methyl modified nucleoside
  modified_base 2: mod_base = OTHER; note = 2-O-methyl modified nucleoside
  modified_base 3: mod_base = OTHER; note = 2-O-methyl modified nucleoside
  modified_base 3: mod_base = OTHER; note = 2-O-methyl modified nucleoside
  modified_base 4: mod_base = OTHER; note = 2-O-methyl modified nucleoside
  modified_base 20: mod_base = OTHER; note = 2-O-methyl modified nucleoside
  modified_base 21: mod_base = OTHER; note = 2-O-methyl modified nucleoside
aactcacaactacgaccgatt

SEQ ID NO: 4241 - RNA, 21 nt, synthetic construct
  source 1..21: mol_type = other RNA
  modified_base 6: mod_base = OTHER; note = 2-fluoro-modified nucleoside
  modified_base 9: mod_base = OTHER; note = 2-fluoro-modified nucleoside
  modified_base 11: mod_base = OTHER; note = 2-fluoro-modified nucleoside
  modified_base 19^20: mod_base = OTHER; note = phosphorothioate linkage
  modified_base 20^21: mod_base = OTHER; note = phosphorothioate linkage
tcacaactacgaccgggaatt

SEQ ID NO: 4242 - RNA, 21 nt, synthetic construct
  source 1..21: mol_type = other RNA
  modified_base 5: mod_base = OTHER; note = 2-fluoro-modified nucleoside
  modified_base 9: mod_base = OTHER; note = 2-fluoro-modified nucleoside
  modified_base 11: mod_base = OTHER; note = 2-fluoro-modified nucleoside
  modified_base 19^20: mod_base = OTHER; note = phosphorothioate linkage
  modified_base 20^21: mod_base = OTHER; note = phosphorothioate linkage
tcacaactacgaccgggaatt

SEQ ID NO: 4243 - RNA, 21 nt, synthetic construct
  source 1..21: mol_type = other RNA
  modified_base 5: mod_base = OTHER; note = 2-fluoro-modified nucleoside
  modified_base 6: mod_base = OTHER; note = 2-fluoro-modified nucleoside
  modified_base 9: mod_base = OTHER; note = 2-fluoro-modified nucleoside
  modified_base 19^20: mod_base = OTHER; note = phosphorothioate linkage
  modified_base 20^21: mod_base = OTHER; note = phosphorothioate linkage
tcacaactacgaccgggaatt

SEQ ID NO: 4244 - RNA, 21 nt, synthetic construct
  source 1..21: mol_type = other RNA
  modified_base 5: mod_base = OTHER; note = 2-fluoro-modified nucleoside
  modified_base 6: mod_base = OTHER; note = 2-fluoro-modified nucleoside
  modified_base 9: mod_base = OTHER; note = 2-fluoro-modified nucleoside
  modified_base 11: mod_base = OTHER; note = 2-fluoro-modified nucleoside
  modified_base 19^20: mod_base = OTHER; note = phosphorothioate linkage
  modified_base 20^21: mod_base = OTHER; note = phosphorothioate linkage
tcacaactacgaccgggaatt

SEQ ID NO: 4245 - RNA, 21 nt, synthetic construct
  source 1..21: mol_type = other RNA
  modified_base 8: mod_base = OTHER; note = 2-fluoro-modified nucleoside
  modified_base 9: mod_base = OTHER; note = 2-fluoro-modified nucleoside
  modified_base 11: mod_base = OTHER; note = 2-fluoro-modified nucleoside
  modified_base 19^20: mod_base = OTHER; note = phosphorothioate linkage
  modified_base 20^21: mod_base = OTHER; note = phosphorothioate linkage
agaagaggacgttcctgcatt

SEQ ID NO: 4246 - RNA, 21 nt, synthetic construct
  source 1..21: mol_type = other RNA
  modified_base 7: mod_base = OTHER; note = 2-fluoro-modified nucleoside
  modified_base 9: mod_base = OTHER; note = 2-fluoro-modified nucleoside
  modified_base 11: mod_base = OTHER; note = 2-fluoro-modified nucleoside
  modified_base 19^20: mod_base = OTHER; note = phosphorothioate linkage
  modified_base 20^21: mod_base = OTHER; note = phosphorothioate linkage
agaagaggacgttcctgcatt

SEQ ID NO: 4247 - RNA, 21 nt, synthetic construct
  source 1..21: mol_type = other RNA
  modified_base 6: mod_base = OTHER; note = 2-fluoro-modified nucleoside
  modified_base 9: mod_base = OTHER; note = 2-fluoro-modified nucleoside
  modified_base 11: mod_base = OTHER; note = 2-fluoro-modified nucleoside
  modified_base 19^20: mod_base = OTHER; note = phosphorothioate linkage
  modified_base 20^21: mod_base = OTHER; note = phosphorothioate linkage
agaagaggacgttcctgcatt

SEQ ID NO: 4248 - RNA, 21 nt, synthetic construct
  source 1..21: mol_type = other RNA
  modified_base 6: mod_base = OTHER; note = 2-fluoro-modified nucleoside
  modified_base 9: mod_base = OTHER; note = 2-fluoro-modified nucleoside
  modified_base 8: mod_base = OTHER; note = 2-fluoro-modified nucleoside
  modified_base 19^20: mod_base = OTHER; note = phosphorothioate linkage
  modified_base 20^21: mod_base = OTHER; note = phosphorothioate linkage
agaagaggacgttcctgcatt

SEQ ID NO: 4249 - RNA, 21 nt, synthetic construct
  source 1..21: mol_type = other RNA
  modified_base 6: mod_base = OTHER; note = 2-fluoro-modified nucleoside
  modified_base 8: mod_base = OTHER; note = 2-fluoro-modified nucleoside
  modified_base 9: mod_base = OTHER; note = 2-fluoro-modified nucleoside
  modified_base 11: mod_base = OTHER; note = 2-fluoro-modified nucleoside
  modified_base 19^20: mod_base = OTHER; note = phosphorothioate linkage
  modified_base 20^21: mod_base = OTHER; note = phosphorothioate linkage
agaagaggacgttcctgcatt

SEQ ID NO: 4250 - RNA, 21 nt, synthetic construct
  source 1..21: mol_type = other RNA
  modified_base 6: mod_base = OTHER; note = 2-fluoro-modified nucleoside
  modified_base 7: mod_base = OTHER; note = 2-fluoro-modified nucleoside
  modified_base 11: mod_base = OTHER; note = 2-fluoro-modified nucleoside
  modified_base 19^20: mod_base = OTHER; note = phosphorothioate linkage
  modified_base 20^21: mod_base = OTHER; note = phosphorothioate linkage
agaagaggacgttcctgcatt

SEQ ID NO: 4251 - RNA, 21 nt, synthetic construct
  source 1..21: mol_type = other RNA
  modified_base 6: mod_base = OTHER; note = 2-fluoro-modified nucleoside
  modified_base 7: mod_base = OTHER; note = 2-fluoro-modified nucleoside
  modified_base 9: mod_base = OTHER; note = 2-fluoro-modified nucleoside
  modified_base 19^20: mod_base = OTHER; note = phosphorothioate linkage
  modified_base 20^21: mod_base = OTHER; note = phosphorothioate linkage
agaagaggacgttcctgcatt

SEQ ID NO: 4252 - RNA, 21 nt, synthetic construct
  source 1..21: mol_type = other RNA
  modified_base 6: mod_base = OTHER; note = 2-fluoro-modified nucleoside
  modified_base 7: mod_base = OTHER; note = 2-fluoro-modified nucleoside
  modified_base 8: mod_base = OTHER; note = 2-fluoro-modified nucleoside
  modified_base 9: mod_base = OTHER; note = 2-fluoro-modified nucleoside
  modified_base 19^20: mod_base = OTHER; note = phosphorothioate linkage
  modified_base 20^21: mod_base = OTHER; note = phosphorothioate linkage
agaagaggacgttcctgcatt

SEQ ID NO: 4253 - RNA, 21 nt, synthetic construct
  source 1..21: mol_type = other RNA
  modified_base 6: mod_base = OTHER; note = 2-fluoro-modified nucleoside
  modified_base 7: mod_base = OTHER; note = 2-fluoro-modified nucleoside
  modified_base 8: mod_base = OTHER; note = 2-fluoro-modified nucleoside
  modified_base 9: mod_base = OTHER; note = 2-fluoro-modified nucleoside
  modified_base 11: mod_base = OTHER; note = 2-fluoro-modified nucleoside
  modified_base 19^20: mod_base = OTHER; note = phosphorothioate linkage
  modified_base 20^21: mod_base = OTHER; note = phosphorothioate linkage
agaagaggacgttcctgcatt

SEQ ID NO: 4254 - RNA, 21 nt, synthetic construct
  source 1..21: mol_type = other RNA
  modified_base 5: mod_base = OTHER; note = 2-fluoro-modified nucleoside
  modified_base 9: mod_base = OTHER; note = 2-fluoro-modified nucleoside
  modified_base 11: mod_base = OTHER; note = 2-fluoro-modified nucleoside
  modified_base 19^20: mod_base = OTHER; note = phosphorothioate linkage
  modified_base 20^21: mod_base = OTHER; note = phosphorothioate linkage
agaagaggacgttcctgcatt

SEQ ID NO: 4255 - RNA, 21 nt, synthetic construct
  source 1..21: mol_type = other RNA
  modified_base 5: mod_base = OTHER; note = 2-fluoro-modified nucleoside
  modified_base 9: mod_base = OTHER; note = 2-fluoro-modified nucleoside
  modified_base 8: mod_base = OTHER; note = 2-fluoro-modified nucleoside
  modified_base 19^20: mod_base = OTHER; note = phosphorothioate linkage
  modified_base 20^21: mod_base = OTHER; note = phosphorothioate linkage
agaagaggacgttcctgcatt

SEQ ID NO: 4256 - RNA, 21 nt, synthetic construct
  source 1..21: mol_type = other RNA
  modified_base 5: mod_base = OTHER; note = 2-fluoro-modified nucleoside
  modified_base 8: mod_base = OTHER; note = 2-fluoro-modified nucleoside
  modified_base 9: mod_base = OTHER; note = 2-fluoro-modified nucleoside
  modified_base 11: mod_base = OTHER; note = 2-fluoro-modified nucleoside
  modified_base 20^21: mod_base = OTHER; note = phosphorothioate linkage
  modified_base 19^20: mod_base = OTHER; note = phosphorothioate linkage
  modified_base 1: mod_base = OTHER; note = 2-O-methyl modified nucleoside
  modified_base 2: mod_base = OTHER; note = 2-O-methyl modified nucleoside
  modified_base 3: mod_base = OTHER; note = 2-O-methyl modified nucleoside
  modified_base 4: mod_base = OTHER; note = 2-O-methyl modified nucleoside
  modified_base 19: mod_base = OTHER; note = 2-O-methyl modified nucleoside
  modified_base 20: mod_base = OTHER; note = 2-O-methyl modified nucleoside
  modified_base 15: mod_base = OTHER; note = 2-O-methyl modified nucleoside
agaagaggacgttcctgcatt

SEQ ID NO: 4257 - RNA, 21 nt, synthetic construct
  source 1..21: mol_type = other RNA
  modified_base 5: mod_base = OTHER; note = 2-fluoro-modified nucleoside
  modified_base 7: mod_base = OTHER; note = 2-fluoro-modified nucleoside
  modified_base 9: mod_base = OTHER; note = 2-fluoro-modified nucleoside
  modified_base 19^20: mod_base = OTHER; note = phosphorothioate linkage
  modified_base 20^21: mod_base = OTHER; note = phosphorothioate linkage
  modified_base 1: mod_base = OTHER; note = 2-O-methyl modified nucleoside
  modified_base 2: mod_base = OTHER; note = 2-O-methyl modified nucleoside
  modified_base 3: mod_base = OTHER; note = 2-O-methyl modified nucleoside
  modified_base 4: mod_base = OTHER; note = 2-O-methyl modified nucleoside
  modified_base 19: mod_base = OTHER; note = 2-O-methyl modified nucleoside
  modified_base 20: mod_base = OTHER; note = 2-O-methyl modified nucleoside
agaagaggacgttcctgcatt

SEQ ID NO: 4258 - RNA, 21 nt, synthetic construct
  source 1..21: mol_type = other RNA
  modified_base 5: mod_base = OTHER; note = 2-fluoro-modified nucleoside
  modified_base 7: mod_base = OTHER; note = 2-fluoro-modified nucleoside
  modified_base 9: mod_base = OTHER; note = 2-fluoro-modified nucleoside
  modified_base 19^20: mod_base = OTHER; note = phosphorothioate linkage
  modified_base 20^21: mod_base = OTHER; note = phosphorothioate linkage
  modified_base 1: mod_base = OTHER; note = 2-O-methyl modified nucleoside
  modified_base 2: mod_base = OTHER; note = 2-O-methyl modified nucleoside
  modified_base 3: mod_base = OTHER; note = 2-O-methyl modified nucleoside
  modified_base 19: mod_base = OTHER; note = 2-O-methyl modified nucleoside
  modified_base 15: mod_base = OTHER; note = 2-O-methyl modified nucleoside
  modified_base 20: mod_base = OTHER; note = 2-O-methyl modified nucleoside
  modified_base 21: mod_base = OTHER; note = 2-O-methyl modified nucleoside
agaagaggacgttcctgcatt

SEQ ID NO: 4259 - RNA, 21 nt, synthetic construct
  source 1..21: mol_type = other RNA
  modified_base 5: mod_base = OTHER; note = 2-fluoro-modified nucleoside
  modified_base 6: mod_base = OTHER; note = 2-fluoro-modified nucleoside
  modified_base 9: mod_base = OTHER; note = 2-fluoro-modified nucleoside
  modified_base 19^20: mod_base = OTHER; note = phosphorothioate linkage
  modified_base 20^21: mod_base = OTHER; note = phosphorothioate linkage
  modified_base 1: mod_base = OTHER; note = 2-O-methyl modified nucleoside
  modified_base 2: mod_base = OTHER; note = 2-O-methyl modified nucleoside
  modified_base 3: mod_base = OTHER; note = 2-O-methyl modified nucleoside
  modified_base 19: mod_base = OTHER; note = 2-O-methyl modified nucleoside
  modified_base 20: mod_base = OTHER; note = 2-O-methyl modified nucleoside
agaagaggacgttcctgcatt

SEQ ID NO: 4260 - RNA, 21 nt, synthetic construct
  source 1..21: mol_type = other RNA
  modified_base 5: mod_base = OTHER; note = 2-fluoro-modified nucleoside
  modified_base 6: mod_base = OTHER; note = 2-fluoro-modified nucleoside
  modified_base 9: mod_base = OTHER; note = 2-fluoro-modified nucleoside
  modified_base 19^20: mod_base = OTHER; note = phosphorothioate linkage
  modified_base 20^21: mod_base = OTHER; note = phosphorothioate linkage
  modified_base 1: mod_base = OTHER; note = 2-O-methyl modified nucleoside
  modified_base 2: mod_base = OTHER; note = 2-O-methyl modified nucleoside
  modified_base 3: mod_base = OTHER; note = 2-O-methyl modified nucleoside
  modified_base 19: mod_base = OTHER; note = 2-O-methyl modified nucleoside
  modified_base 20: mod_base = OTHER; note = 2-O-methyl modified nucleoside
  modified_base 21: mod_base = OTHER; note = 2-O-methyl modified nucleoside
agaagaggacgttcctgcatt

SEQ ID NO: 4261 - RNA, 21 nt, synthetic construct
  source 1..21: mol_type = other RNA
  modified_base 5: mod_base = OTHER; note = 2-fluoro-modified nucleoside
  modified_base 6: mod_base = OTHER; note = 2-fluoro-modified nucleoside
  modified_base 8: mod_base = OTHER; note = 2-fluoro-modified nucleoside
  modified_base 9: mod_base = OTHER; note = 2-fluoro-modified nucleoside
  modified_base 19^20: mod_base = OTHER; note = phosphorothioate linkage
  modified_base 20^21: mod_base = OTHER; note = phosphorothioate linkage
agaagaggacgttcctgcatt

SEQ ID NO: 4262 - RNA, 21 nt, synthetic construct
  source 1..21: mol_type = other RNA
  modified_base 5: mod_base = OTHER; note = 2-fluoro-modified nucleoside
  modified_base 6: mod_base = OTHER; note = 2-fluoro-modified nucleoside
  modified_base 8: mod_base = OTHER; note = 2-fluoro-modified nucleoside
  modified_base 9: mod_base = OTHER; note = 2-fluoro-modified nucleoside
  modified_base 19^20: mod_base = OTHER; note = phosphorothioate linkage
  modified_base 20^21: mod_base = OTHER; note = phosphorothioate linkage
agaagaggacgttcctgcatt

SEQ ID NO: 4263 - RNA, 21 nt, synthetic construct
  source 1..21: mol_type = other RNA
  modified_base 5: mod_base = OTHER; note = 2-fluoro-modified nucleoside
  modified_base 6: mod_base = OTHER; note = 2-fluoro-modified nucleoside
  modified_base 7: mod_base = OTHER; note = 2-fluoro-modified nucleoside
  modified_base 8: mod_base = OTHER; note = 2-fluoro-modified nucleoside
  modified_base 9: mod_base = OTHER; note = 2-fluoro-modified nucleoside
  modified_base 19^20: mod_base = OTHER; note = phosphorothioate linkage
  modified_base 20^21: mod_base = OTHER; note = phosphorothioate linkage
agaagaggacgttcctgcatt

SEQ ID NO: 4264 - RNA, 21 nt, synthetic construct
  source 1..21: mol_type = other RNA
  modified_base 8: mod_base = OTHER; note = 2-fluoro-modified nucleoside
  modified_base 9: mod_base = OTHER; note = 2-fluoro-modified nucleoside
  modified_base 11: mod_base = OTHER; note = 2-fluoro-modified nucleoside
  modified_base 19^20: mod_base = OTHER; note = phosphorothioate linkage
  modified_base 20^21: mod_base = OTHER; note = phosphorothioate linkage
agcacttcttcaaccgcaatt

SEQ ID NO: 4265 - RNA, 21 nt, synthetic construct
  source 1..21: mol_type = other RNA
  modified_base 8: mod_base = OTHER; note = 2-fluoro-modified nucleoside
  modified_base 9: mod_base = OTHER; note = 2-fluoro-modified nucleoside
  modified_base 10: mod_base = OTHER; note = 2-fluoro-modified nucleoside
  modified_base 11: mod_base = OTHER; note = 2-fluoro-modified nucleoside
  modified_base 19^20: mod_base = OTHER; note = phosphorothioate linkage
  modified_base 20^21: mod_base = OTHER; note = phosphorothioate linkage
agcacttcttcaaccgcaatt

SEQ ID NO: 4266 - RNA, 21 nt, synthetic construct
  source 1..21: mol_type = other RNA
  modified_base 7: mod_base = OTHER; note = 2-fluoro-modified nucleoside
  modified_base 9: mod_base = OTHER; note = 2-fluoro-modified nucleoside
  modified_base 11: mod_base = OTHER; note = 2-fluoro-modified nucleoside
  modified_base 19^20: mod_base = OTHER; note = phosphorothioate linkage
  modified_base 20^21: mod_base = OTHER; note = phosphorothioate linkage
agcacttcttcaaccgcaatt

SEQ ID NO: 4267 - RNA, 21 nt, synthetic construct
  source 1..21: mol_type = other RNA
  modified_base 7: mod_base = OTHER; note = 2-fluoro-modified nucleoside
  modified_base 9: mod_base = OTHER; note = 2-fluoro-modified nucleoside
  modified_base 10: mod_base = OTHER; note = 2-fluoro-modified nucleoside
  modified_base 19^20: mod_base = OTHER; note = phosphorothioate linkage
  modified_base 20^21: mod_base = OTHER; note = phosphorothioate linkage
agcacttcttcaaccgcaatt

SEQ ID NO: 4268 - RNA, 21 nt, synthetic construct
  source 1..21: mol_type = other RNA
  modified_base 7: mod_base = OTHER; note = 2-fluoro-modified nucleoside
  modified_base 8: mod_base = OTHER; note = 2-fluoro-modified nucleoside
  modified_base 9: mod_base = OTHER; note = 2-fluoro-modified nucleoside
  modified_base 10: mod_base = OTHER; note = 2-fluoro-modified nucleoside
  modified_base 19^20: mod_base = OTHER; note = phosphorothioate linkage
  modified_base 20^21: mod_base = OTHER; note = phosphorothioate linkage
agcacttcttcaaccgcaatt

SEQ ID NO: 4269 - RNA, 21 nt, synthetic construct
  source 1..21: mol_type = other RNA
  modified_base 7: mod_base = OTHER; note = 2-fluoro-modified nucleoside
  modified_base 8: mod_base = OTHER; note = 2-fluoro-modified nucleoside
  modified_base 9: mod_base = OTHER; note = 2-fluoro-modified nucleoside
  modified_base 10: mod_base = OTHER; note = 2-fluoro-modified nucleoside
  modified_base 19^20: mod_base = OTHER; note = phosphorothioate linkage
  modified_base 20^21: mod_base = OTHER; note = phosphorothioate linkage
agcacttcttcaaccgcaatt

SEQ ID NO: 4270 - RNA, 21 nt, synthetic construct
  source 1..21: mol_type = other RNA
  modified_base 6: mod_base = OTHER; note = 2-fluoro-modified nucleoside
  modified_base 9: mod_base = OTHER; note = 2-fluoro-modified nucleoside
  modified_base 11: mod_base = OTHER; note = 2-fluoro-modified nucleoside
  modified_base 19^20: mod_base = OTHER; note = phosphorothioate linkage
  modified_base 20^21: mod_base = OTHER; note = phosphorothioate linkage
agcacttcttcaaccgcaatt

SEQ ID NO: 4271 - RNA, 21 nt, synthetic construct
  source 1..21: mol_type = other RNA
  modified_base 6: mod_base = OTHER; note = 2-fluoro-modified nucleoside
  modified_base 9: mod_base = OTHER; note = 2-fluoro-modified nucleoside
  modified_base 10: mod_base = OTHER; note = 2-fluoro-modified nucleoside
  modified_base 19^20: mod_base = OTHER; note = phosphorothioate linkage
  modified_base 20^21: mod_base = OTHER; note = phosphorothioate linkage
agcacttcttcaaccgcaatt

SEQ ID NO: 4272 - RNA, 21 nt, synthetic construct
  source 1..21: mol_type = other RNA
  modified_base 6: mod_base = OTHER; note = 2-fluoro-modified nucleoside
  modified_base 8: mod_base = OTHER; note = 2-fluoro-modified nucleoside
  modified_base 9: mod_base = OTHER; note = 2-fluoro-modified nucleoside
  modified_base 19^20: mod_base = OTHER; note = phosphorothioate linkage
  modified_base 20^21: mod_base = OTHER; note = phosphorothioate linkage
agcacttcttcaaccgcaatt

SEQ ID NO: 4273 - RNA, 21 nt, synthetic construct
  source 1..21: mol_type = other RNA
  modified_base 6: mod_base = OTHER; note = 2-fluoro-modified nucleoside
  modified_base 8: mod_base = OTHER; note = 2-fluoro-modified nucleoside
  modified_base 9: mod_base = OTHER; note = 2-fluoro-modified nucleoside
  modified_base 11: mod_base = OTHER; note = 2-fluoro-modified nucleoside
  modified_base 19^20: mod_base = OTHER; note = phosphorothioate linkage
  modified_base 20^21: mod_base = OTHER; note = phosphorothioate linkage
agcacttcttcaaccgcaatt

SEQ ID NO: 4274 - RNA, 21 nt, synthetic construct
  source 1..21: mol_type = other RNA
  modified_base 6: mod_base = OTHER; note = 2-fluoro-modified nucleoside
  modified_base 8: mod_base = OTHER; note = 2-fluoro-modified nucleoside
  modified_base 9: mod_base = OTHER; note = 2-fluoro-modified nucleoside
  modified_base 10: mod_base = OTHER; note = 2-fluoro-modified nucleoside
  modified_base 11: mod_base = OTHER; note = 2-fluoro-modified nucleoside
  modified_base 19^20: mod_base = OTHER; note = phosphorothioate linkage
  modified_base 20^21: mod_base = OTHER; note = phosphorothioate linkage
agcacttcttcaaccgcaatt

SEQ ID NO: 4275 - RNA, 21 nt, synthetic construct
  source 1..21: mol_type = other RNA
  modified_base 6: mod_base = OTHER; note = 2-fluoro-modified nucleoside
  modified_base 7: mod_base = OTHER; note = 2-fluoro-modified nucleoside
  modified_base 9: mod_base = OTHER; note = 2-fluoro-modified nucleoside
  modified_base 19^20: mod_base = OTHER; note = phosphorothioate linkage
  modified_base 20^21: mod_base = OTHER; note = phosphorothioate linkage
agcacttcttcaaccgcaatt

SEQ ID NO: 4276 - RNA, 21 nt, synthetic construct
  source 1..21: mol_type = other RNA
  modified_base 6: mod_base = OTHER; note = 2-fluoro-modified nucleoside
  modified_base 7: mod_base = OTHER; note = 2-fluoro-modified nucleoside
  modified_base 9: mod_base = OTHER; note = 2-fluoro-modified nucleoside
  modified_base 11: mod_base = OTHER; note = 2-fluoro-modified nucleoside
  modified_base 19^20: mod_base = OTHER; note = phosphorothioate linkage
  modified_base 20^21: mod_base = OTHER; note = phosphorothioate linkage
agcacttcttcaaccgcaatt

SEQ ID NO: 4277 - RNA, 21 nt, synthetic construct
  source 1..21: mol_type = other RNA
  modified_base 6: mod_base = OTHER; note = 2-fluoro-modified nucleoside
  modified_base 7: mod_base = OTHER; note = 2-fluoro-modified nucleoside
  modified_base 9: mod_base = OTHER; note = 2-fluoro-modified nucleoside
  modified_base 10: mod_base = OTHER; note = 2-fluoro-modified nucleoside
  modified_base 19^20: mod_base = OTHER; note = phosphorothioate linkage
  modified_base 20^21: mod_base = OTHER; note = phosphorothioate linkage
agcacttcttcaaccgcaatt

SEQ ID NO: 4278 - RNA, 21 nt, synthetic construct
  source 1..21: mol_type = other RNA
  modified_base 6: mod_base = OTHER; note = 2-fluoro-modified nucleoside
  modified_base 7: mod_base = OTHER; note = 2-fluoro-modified nucleoside
  modified_base 8: mod_base = OTHER; note = 2-fluoro-modified nucleoside
  modified_base 9: mod_base = OTHER; note = 2-fluoro-modified nucleoside
  modified_base 19^20: mod_base = OTHER; note = phosphorothioate linkage
  modified_base 20^21: mod_base = OTHER; note = phosphorothioate linkage
agcacttcttcaaccgcaatt

SEQ ID NO: 4279 - RNA, 21 nt, synthetic construct
  source 1..21: mol_type = other RNA
  modified_base 6: mod_base = OTHER; note = 2-fluoro-modified nucleoside
  modified_base 7: mod_base = OTHER; note = 2-fluoro-modified nucleoside
  modified_base 8: mod_base = OTHER; note = 2-fluoro-modified nucleoside
  modified_base 9: mod_base = OTHER; note = 2-fluoro-modified nucleoside
  modified_base 11: mod_base = OTHER; note = 2-fluoro-modified nucleoside
  modified_base 19^20: mod_base = OTHER; note = phosphorothioate linkage
  modified_base 20^21: mod_base = OTHER; note = phosphorothioate linkage
agcacttcttcaaccgcaatt

SEQ ID NO: 4280 - RNA, 21 nt, synthetic construct
  source 1..21: mol_type = other RNA
  modified_base 6: mod_base = OTHER; note = 2-fluoro-modified nucleoside
  modified_base 7: mod_base = OTHER; note = 2-fluoro-modified nucleoside
  modified_base 8: mod_base = OTHER; note = 2-fluoro-modified nucleoside
  modified_base 9: mod_base = OTHER; note = 2-fluoro-modified nucleoside
  modified_base 10: mod_base = OTHER; note = 2-fluoro-modified nucleoside
  modified_base 19^20: mod_base = OTHER; note = phosphorothioate linkage
  modified_base 20^21: mod_base = OTHER; note = phosphorothioate linkage
agcacttcttcaaccgcaatt

SEQ ID NO: 4281 - RNA, 21 nt, synthetic construct
  source 1..21: mol_type = other RNA
  modified_base 5: mod_base = OTHER; note = 2-fluoro-modified nucleoside
  modified_base 9: mod_base = OTHER; note = 2-fluoro-modified nucleoside
  modified_base 11: mod_base = OTHER; note = 2-fluoro-modified nucleoside
  modified_base 19^20: mod_base = OTHER; note = phosphorothioate linkage
  modified_base 20^21: mod_base = OTHER; note = phosphorothioate linkage
  modified_base 1: mod_base = OTHER; note = 2-O-methyl modified nucleoside
  modified_base 2: mod_base = OTHER; note = 2-O-methyl modified nucleoside
  modified_base 3: mod_base = OTHER; note = 2-O-methyl modified nucleoside
  modified_base 12: mod_base = OTHER; note = 2-O-methyl modified nucleoside
  modified_base 6: mod_base = OTHER; note = 2-O-methyl modified nucleoside
  modified_base 15: mod_base = OTHER; note = 2-O-methyl modified nucleoside
  modified_base 18: mod_base = OTHER; note = 2-O-methyl modified nucleoside
  modified_base 20: mod_base = OTHER; note = 2-O-methyl modified nucleoside
agcacttcttcaaccgcaatt

SEQ ID NO: 4282 - RNA, 21 nt, synthetic construct
  source 1..21: mol_type = other RNA
  modified_base 5: mod_base = OTHER; note = 2-fluoro-modified nucleoside
  modified_base 10: mod_base = OTHER; note = 2-fluoro-modified nucleoside
  modified_base 9: mod_base = OTHER; note = 2-fluoro-modified nucleoside
  modified_base 19^20: mod_base = OTHER; note = phosphorothioate linkage
  modified_base 20^21: mod_base = OTHER; note = phosphorothioate linkage
agcacttcttcaaccgcaatt

SEQ ID NO: 4283 - RNA, 21 nt, synthetic construct
  source 1..21: mol_type = other RNA
  modified_base 5: mod_base = OTHER; note = 2-fluoro-modified nucleoside
  modified_base 8: mod_base = OTHER; note = 2-fluoro-modified nucleoside
  modified_base 9: mod_base = OTHER; note = 2-fluoro-modified nucleoside
  modified_base 19^20: mod_base = OTHER; note = phosphorothioate linkage
  modified_base 20^21: mod_base = OTHER; note = phosphorothioate linkage
  modified_base 1: mod_base = OTHER; note = 2-O-methyl modified nucleoside
  modified_base 2: mod_base = OTHER; note = 2-O-methyl modified nucleoside
  modified_base 3: mod_base = OTHER; note = 2-O-methyl modified nucleoside
  modified_base 4: mod_base = OTHER; note = 2-O-methyl modified nucleoside
  modified_base 6: mod_base = OTHER; note = 2-O-methyl modified nucleoside
  modified_base 10: mod_base = OTHER; note = 2-O-methyl modified nucleoside
  modified_base 14: mod_base = OTHER; note = 2-O-methyl modified nucleoside
agcacttcttcaaccgcaatt

SEQ ID NO: 4284 - RNA, 21 nt, synthetic construct
  source 1..21: mol_type = other RNA
  modified_base 5: mod_base = OTHER; note = 2-fluoro-modified nucleoside
  modified_base 8: mod_base = OTHER; note = 2-fluoro-modified nucleoside
  modified_base 9: mod_base = OTHER; note = 2-fluoro-modified nucleoside
  modified_base 11: mod_base = OTHER; note = 2-fluoro-modified nucleoside
  modified_base 19^20: mod_base = OTHER; note = phosphorothioate linkage
  modified_base 20^21: mod_base = OTHER; note = phosphorothioate linkage
  modified_base 1: mod_base = OTHER; note = 2-O-methyl modified nucleoside
  modified_base 2: mod_base = OTHER; note = 2-O-methyl modified nucleoside
  modified_base 3: mod_base = OTHER; note = 2-O-methyl modified nucleoside
  modified_base 4: mod_base = OTHER; note = 2-O-methyl modified nucleoside
agcacttcttcaaccgcaatt

SEQ ID NO: 4285 - RNA, 21 nt, synthetic construct
  source 1..21: mol_type = other RNA
  modified_base 5: mod_base = OTHER; note = 2-fluoro-modified nucleoside
  modified_base 8: mod_base = OTHER; note = 2-fluoro-modified nucleoside
  modified_base 9: mod_base = OTHER; note = 2-fluoro-modified nucleoside
  modified_base 10: mod_base = OTHER; note = 2-fluoro-modified nucleoside
  modified_base 11: mod_base = OTHER; note = 2-fluoro-modified nucleoside
  modified_base 19^20: mod_base = OTHER; note = phosphorothioate linkage
  modified_base 20^21: mod_base = OTHER; note = phosphorothioate linkage
  modified_base 1: mod_base = OTHER; note = 2-O-methyl modified nucleoside
  modified_base 3: mod_base = OTHER; note = 2-O-methyl modified nucleoside
  modified_base 14: mod_base = OTHER; note = 2-O-methyl modified nucleoside
  modified_base 15: mod_base = OTHER; note = 2-O-methyl modified nucleoside
  modified_base 18: mod_base = OTHER; note = 2-O-methyl modified nucleoside
  modified_base 21: mod_base = OTHER; note = 2-O-methyl modified nucleoside
agcacttcttcaaccgcaatt

SEQ ID NO: 4286 - RNA, 21 nt, synthetic construct
  source 1..21: mol_type = other RNA
  modified_base 5: mod_base = OTHER; note = 2-fluoro-modified nucleoside
  modified_base 7: mod_base = OTHER; note = 2-fluoro-modified nucleoside
  modified_base 9: mod_base = OTHER; note = 2-fluoro-modified nucleoside
  modified_base 19^20: mod_base = OTHER; note = phosphorothioate linkage
  modified_base 20^21: mod_base = OTHER; note = phosphorothioate linkage
  modified_base 1: mod_base = OTHER; note = 2-O-methyl modified nucleoside
  modified_base 2: mod_base = OTHER; note = 2-O-methyl modified nucleoside
  modified_base 3: mod_base = OTHER; note = 2-O-methyl modified nucleoside
  modified_base 4: mod_base = OTHER; note = 2-O-methyl modified nucleoside
  modified_base 10: mod_base = OTHER; note = 2-O-methyl modified nucleoside
  modified_base 12: mod_base = OTHER; note = 2-O-methyl modified nucleoside
  modified_base 13: mod_base = OTHER; note = 2-O-methyl modified nucleoside
  modified_base 17: mod_base = OTHER; note = 2-O-methyl modified nucleoside
agcacttcttcaaccgcaatt

SEQ ID NO: 4287 - RNA, 21 nt, synthetic construct
  source 1..21: mol_type = other RNA
  modified_base 5: mod_base = OTHER; note = 2-fluoro-modified nucleoside
  modified_base 7: mod_base = OTHER; note = 2-fluoro-modified nucleoside
  modified_base 9: mod_base = OTHER; note = 2-fluoro-modified nucleoside
  modified_base 11: mod_base = OTHER; note = 2-fluoro-modified nucleoside
  modified_base 19^20: mod_base = OTHER; note = phosphorothioate linkage
  modified_base 20^21: mod_base = OTHER; note = phosphorothioate linkage
  modified_base 1: mod_base = OTHER; note = 2-O-methyl modified nucleoside
  modified_base 13: mod_base = OTHER; note = 2-O-methyl modified nucleoside
  modified_base 15: mod_base = OTHER; note = 2-O-methyl modified nucleoside
  modified_base 17: mod_base = OTHER; note = 2-O-methyl modified nucleoside
  modified_base 20: mod_base = OTHER; note = 2-O-methyl modified nucleoside
agcacttcttcaaccgcaatt

SEQ ID NO: 4288 - RNA, 21 nt, synthetic construct
  source 1..21: mol_type = other RNA
  modified_base 5: mod_base = OTHER; note = 2-fluoro-modified nucleoside
  modified_base 7: mod_base = OTHER; note = 2-fluoro-modified nucleoside
  modified_base 9: mod_base = OTHER; note = 2-fluoro-modified nucleoside
  modified_base 10: mod_base = OTHER; note = 2-fluoro-modified nucleoside
  modified_base 19^20: mod_base = OTHER; note = phosphorothioate linkage
  modified_base 20^21: mod_base = OTHER; note = phosphorothioate linkage
  modified_base 1: mod_base = OTHER; note = 2-O-methyl modified nucleoside
  modified_base 2: mod_base = OTHER; note = 2-O-methyl modified nucleoside
  modified_base 4: mod_base = OTHER; note = 2-O-methyl modified nucleoside
  modified_base 11: mod_base = OTHER; note = 2-O-methyl modified nucleoside
  modified_base 14: mod_base = OTHER; note = 2-O-methyl modified nucleoside
  modified_base 17: mod_base = OTHER; note = 2-O-methyl modified nucleoside
agcacttcttcaaccgcaatt

SEQ ID NO: 4289 - RNA, 21 nt, synthetic construct
  source 1..21: mol_type = other RNA
  modified_base 5: mod_base = OTHER; note = 2-fluoro-modified nucleoside
  modified_base 7: mod_base = OTHER; note = 2-fluoro-modified nucleoside
  modified_base 8: mod_base = OTHER; note = 2-fluoro-modified nucleoside
  modified_base 9: mod_base = OTHER; note = 2-fluoro-modified nucleoside
  modified_base 10: mod_base = OTHER; note = 2-fluoro-modified nucleoside
  modified_base 19^20: mod_base = OTHER; note = phosphorothioate linkage
  modified_base 20^21: mod_base = OTHER; note = phosphorothioate linkage
  modified_base 1: mod_base = OTHER; note = 2-O-methyl modified nucleoside
  modified_base 2: mod_base = OTHER; note = 2-O-methyl modified nucleoside
  modified_base 3: mod_base = OTHER; note = 2-O-methyl modified nucleoside
  modified_base 19: mod_base = OTHER; note = 2-O-methyl modified nucleoside
  modified_base 17: mod_base = OTHER; note = 2-O-methyl modified nucleoside
  modified_base 16: mod_base = OTHER; note = 2-O-methyl modified nucleoside
  modified_base 14: mod_base = OTHER; note = 2-O-methyl modified nucleoside
agcacttcttcaaccgcaatt

SEQ ID NO: 4290 - RNA, 21 nt, synthetic construct
  source 1..21: mol_type = other RNA
  modified_base 5: mod_base = OTHER; note = 2-fluoro-modified nucleoside
  modified_base 6: mod_base = OTHER; note = 2-fluoro-modified nucleoside
  modified_base 9: mod_base = OTHER; note = 2-fluoro-modified nucleoside
  modified_base 19^20: mod_base = OTHER; note = phosphorothioate linkage
  modified_base 20^21: mod_base = OTHER; note = phosphorothioate linkage
  modified_base 1: mod_base = OTHER; note = 2-O-methyl modified nucleoside
  modified_base 2: mod_base = OTHER; note = 2-O-methyl modified nucleoside
  modified_base 3: mod_base = OTHER; note = 2-O-methyl modified nucleoside
  modified_base 4: mod_base = OTHER; note = 2-O-methyl modified nucleoside
  modified_base 6: mod_base = OTHER; note = 2-O-methyl modified nucleoside
  modified_base 7: mod_base = OTHER; note = 2-O-methyl modified nucleoside
  modified_base 8: mod_base = OTHER; note = 2-O-methyl modified nucleoside
  modified_base 17: mod_base = OTHER; note = 2-O-methyl modified nucleoside
agcacttcttcaaccgcaatt

SEQ ID NO: 4291 - RNA, 21 nt, synthetic construct
  source 1..21: mol_type = other RNA
  modified_base 5: mod_base = OTHER; note = 2-fluoro-modified nucleoside
  modified_base 6: mod_base = OTHER; note = 2-fluoro-modified nucleoside
  modified_base 9: mod_base = OTHER; note = 2-fluoro-modified nucleoside
  modified_base 11: mod_base = OTHER; note = 2-fluoro-modified nucleoside
  modified_base 19^20: mod_base = OTHER; note = phosphorothioate linkage
  modified_base 20^21: mod_base = OTHER; note = phosphorothioate linkage
  modified_base 1: mod_base = OTHER; note = 2-O-methyl modified nucleoside
  modified_base 2: mod_base = OTHER; note = 2-O-methyl modified nucleoside
  modified_base 3: mod_base = OTHER; note = 2-O-methyl modified nucleoside
  modified_base 4: mod_base = OTHER; note = 2-O-methyl modified nucleoside
  modified_base 7: mod_base = OTHER; note = 2-O-methyl modified nucleoside
  modified_base 8: mod_base = OTHER; note = 2-O-methyl modified nucleoside
  modified_base 10: mod_base = OTHER; note = 2-O-methyl modified nucleoside
  modified_base 12: mod_base = OTHER; note = 2-O-methyl modified nucleoside
  modified_base 14: mod_base = OTHER; note = 2-O-methyl modified nucleoside
  modified_base 19: mod_base = OTHER; note = 2-O-methyl modified nucleoside
  modified_base 17: mod_base = OTHER; note = 2-O-methyl modified nucleoside
agcacttcttcaaccgcaatt

SEQ ID NO: 4292 - RNA, 21 nt, synthetic construct
  source 1..21: mol_type = other RNA
  modified_base 5: mod_base = OTHER; note = 2-fluoro-modified nucleoside
  modified_base 6: mod_base = OTHER; note = 2-fluoro-modified nucleoside
  modified_base 9: mod_base = OTHER; note = 2-fluoro-modified nucleoside
  modified_base 10: mod_base = OTHER; note = 2-fluoro-modified nucleoside
  modified_base 19^20: mod_base = OTHER; note = phosphorothioate linkage
  modified_base 20^21: mod_base = OTHER; note = phosphorothioate linkage
  modified_base 2: mod_base = OTHER; note = 2-O-methyl modified nucleoside
  modified_base 1: mod_base = OTHER; note = 2-O-methyl modified nucleoside
  modified_base 3: mod_base = OTHER; note = 2-O-methyl modified nucleoside
  modified_base 7: mod_base = OTHER; note = 2-O-methyl modified nucleoside
  modified_base 11: mod_base = OTHER; note = 2-O-methyl modified nucleoside
agcacttcttcaaccgcaatt

SEQ ID NO: 4293 - RNA, 21 nt, synthetic construct
  source 1..21: mol_type = other RNA
  modified_base 5: mod_base = OTHER; note = 2-fluoro-modified nucleoside
  modified_base 6: mod_base = OTHER; note = 2-fluoro-modified nucleoside
  modified_base 8: mod_base = OTHER; note = 2-fluoro-modified nucleoside
  modified_base 9: mod_base = OTHER; note = 2-fluoro-modified nucleoside
  modified_base 19^20: mod_base = OTHER; note = phosphorothioate linkage
  modified_base 20^21: mod_base = OTHER; note = phosphorothioate linkage
  modified_base 1: mod_base = OTHER; note = 2-O-methyl modified nucleoside
  modified_base 2: mod_base = OTHER; note = 2-O-methyl modified nucleoside
  modified_base 3: mod_base = OTHER; note = 2-O-methyl modified nucleoside
  modified_base 7: mod_base = OTHER; note = 2-O-methyl modified nucleoside
  modified_base 11: mod_base = OTHER; note = 2-O-methyl modified nucleoside
  modified_base 13: mod_base = OTHER; note = 2-O-methyl modified nucleoside
  modified_base 15: mod_base = OTHER; note = 2-O-methyl modified nucleoside
agcacttcttcaaccgcaatt

SEQ ID NO: 4294 - RNA, 21 nt, synthetic construct
  source 1..21: mol_type = other RNA
  modified_base 5: mod_base = OTHER; note = 2-fluoro-modified nucleoside
  modified_base 6: mod_base = OTHER; note = 2-fluoro-modified nucleoside
  modified_base 8: mod_base = OTHER; note = 2-fluoro-modified nucleoside
  modified_base 9: mod_base = OTHER; note = 2-fluoro-modified nucleoside
  modified_base 11: mod_base = OTHER; note = 2-fluoro-modified nucleoside
  modified_base 19^20: mod_base = OTHER; note = phosphorothioate linkage
  modified_base 20^21: mod_base = OTHER; note = phosphorothioate linkage
  modified_base 1: mod_base = OTHER; note = 2-O-methyl modified nucleoside
  modified_base 2: mod_base = OTHER; note = 2-O-methyl modified nucleoside
  modified_base 3: mod_base = OTHER; note = 2-O-methyl modified nucleoside
  modified_base 12: mod_base = OTHER; note = 2-O-methyl modified nucleoside
  modified_base 13: mod_base = OTHER; note = 2-O-methyl modified nucleoside
  modified_base 15: mod_base = OTHER; note = 2-O-methyl modified nucleoside
agcacttcttcaaccgcaatt

SEQ ID NO: 4295 - RNA, 21 nt, synthetic construct
  source 1..21: mol_type = other RNA
  modified_base 5: mod_base = OTHER; note = 2-fluoro-modified nucleoside
  modified_base 6: mod_base = OTHER; note = 2-fluoro-modified nucleoside
  modified_base 7: mod_base = OTHER; note = 2-fluoro-modified nucleoside
  modified_base 8: mod_base = OTHER; note = 2-fluoro-modified nucleoside
  modified_base 9: mod_base = OTHER; note = 2-fluoro-modified nucleoside
  modified_base 19^20: mod_base = OTHER; note = phosphorothioate linkage
  modified_base 20^21: mod_base = OTHER; note = phosphorothioate linkage
  modified_base 1: mod_base = OTHER; note = 2-O-methyl modified nucleoside
  modified_base 2: mod_base = OTHER; note = 2-O-methyl modified nucleoside
  modified_base 3: mod_base = OTHER; note = 2-O-methyl modified nucleoside
  modified_base 18: mod_base = OTHER; note = 2-O-methyl modified nucleoside
  modified_base 15: mod_base = OTHER; note = 2-O-methyl modified nucleoside
agcacttcttcaaccgcaatt

SEQ ID NO: 4296 - RNA, 21 nt, synthetic construct
  source 1..21: mol_type = other RNA
  modified_base 6: mod_base = OTHER; note = 2-fluoro-modified nucleoside
  modified_base 8: mod_base = OTHER; note = 2-fluoro-modified nucleoside
  modified_base 9: mod_base = OTHER; note = 2-fluoro-modified nucleoside
  modified_base 19^20: mod_base = OTHER; note = phosphorothioate linkage
  modified_base 20^21: mod_base = OTHER; note = phosphorothioate linkage
  modified_base 1: mod_base = OTHER; note = 2-O-methyl modified nucleoside
  modified_base 2: mod_base = OTHER; note = 2-O-methyl modified nucleoside
  modified_base 3: mod_base = OTHER; note = 2-O-methyl modified nucleoside
  modified_base 4: mod_base = OTHER; note = 2-O-methyl modified nucleoside
  modified_base 5: mod_base = OTHER; note = 2-O-methyl modified nucleoside
  modified_base 10: mod_base = OTHER; note = 2-O-methyl modified nucleoside
  modified_base 11: mod_base = OTHER; note = 2-O-methyl modified nucleoside
  modified_base 13: mod_base = OTHER; note = 2-O-methyl modified nucleoside
  modified_base 15: mod_base = OTHER; note = 2-O-methyl modified nucleoside
  modified_base 17: mod_base = OTHER; note = 2-O-methyl modified nucleoside
cacttcttcaaccgcacgatt

SEQ ID NO: 4297 - RNA, 21 nt, synthetic construct
  source 1..21: mol_type = other RNA
  modified_base 6: mod_base = OTHER; note = 2-fluoro-modified nucleoside
  modified_base 7: mod_base = OTHER; note = 2-fluoro-modified nucleoside
  modified_base 9: mod_base = OTHER; note = 2-fluoro-modified nucleoside
  modified_base 19^20: mod_base = OTHER; note = phosphorothioate linkage
  modified_base 20^21: mod_base = OTHER; note = phosphorothioate linkage
  modified_base 5: mod_base = OTHER; note = 2-O-methyl modified nucleoside
  modified_base 8: mod_base = OTHER; note = 2-O-methyl modified nucleoside
  modified_base 1: mod_base = OTHER; note = 2-O-methyl modified nucleoside
  modified_base 2: mod_base = OTHER; note = 2-O-methyl modified nucleoside
  modified_base 3: mod_base = OTHER; note = 2-O-methyl modified nucleoside
  modified_base 4: mod_base = OTHER; note = 2-O-methyl modified nucleoside
  modified_base 11: mod_base = OTHER; note = 2-O-methyl modified nucleoside
  modified_base 13: mod_base = OTHER; note = 2-O-methyl modified nucleoside
  modified_base 15: mod_base = OTHER; note = 2-O-methyl modified nucleoside
  modified_base 17: mod_base = OTHER; note = 2-O-methyl modified nucleoside
cacttcttcaaccgcacgatt

SEQ ID NO: 4298 - RNA, 21 nt, synthetic construct
  source 1..21: mol_type = other RNA
  modified_base 6: mod_base = OTHER; note = 2-fluoro-modified nucleoside
  modified_base 7: mod_base = OTHER; note = 2-fluoro-modified nucleoside
  modified_base 8: mod_base = OTHER; note = 2-fluoro-modified nucleoside
  modified_base 9: mod_base = OTHER; note = 2-fluoro-modified nucleoside
  modified_base 19^20: mod_base = OTHER; note = phosphorothioate linkage
  modified_base 20^21: mod_base = OTHER; note = phosphorothioate linkage
  modified_base 1: mod_base = OTHER; note = 2-O-methyl modified nucleoside
  modified_base 2: mod_base = OTHER; note = 2-O-methyl modified nucleoside
  modified_base 3: mod_base = OTHER; note = 2-O-methyl modified nucleoside
  modified_base 4: mod_base = OTHER; note = 2-O-methyl modified nucleoside
  modified_base 5: mod_base = OTHER; note = 2-O-methyl modified nucleoside
  modified_base 11: mod_base = OTHER; note = 2-O-methyl modified nucleoside
  modified_base 12: mod_base = OTHER; note = 2-O-methyl modified nucleoside
  modified_base 14: mod_base = OTHER; note = 2-O-methyl modified nucleoside
  modified_base 15: mod_base = OTHER; note = 2-O-methyl modified nucleoside
cacttcttcaaccgcacgatt

SEQ ID NO: 4299 - RNA, 21 nt, synthetic construct
  source 1..21: mol_type = other RNA
  modified_base 5: mod_base = OTHER; note = 2-fluoro-modified nucleoside
  modified_base 8: mod_base = OTHER; note = 2-fluoro-modified nucleoside
  modified_base 9: mod_base = OTHER; note = 2-fluoro-modified nucleoside
  modified_base 19^20: mod_base = OTHER; note = phosphorothioate linkage
  modified_base 20^21: mod_base = OTHER; note = phosphorothioate linkage
  modified_base 1: mod_base = OTHER; note = 2-O-methyl modified nucleoside
  modified_base 2: mod_base = OTHER; note = 2-O-methyl modified nucleoside
  modified_base 3: mod_base = OTHER; note = 2-O-methyl modified nucleoside
  modified_base 4: mod_base = OTHER; note = 2-O-methyl modified nucleoside
  modified_base 15: mod_base = OTHER; note = 2-O-methyl modified nucleoside
  modified_base 14: mod_base = OTHER; note = 2-O-methyl modified nucleoside
  modified_base 11: mod_base = OTHER; note = 2-O-methyl modified nucleoside
  modified_base 19: mod_base = OTHER; note = 2-O-methyl modified nucleoside
cacttcttcaaccgcacgatt

SEQ ID NO: 4300 - RNA, 21 nt, synthetic construct
  source 1..21: mol_type = other RNA
  modified_base 5: mod_base = OTHER; note = 2-fluoro-modified nucleoside
  modified_base 7: mod_base = OTHER; note = 2-fluoro-modified nucleoside
  modified_base 9: mod_base = OTHER; note = 2-fluoro-modified nucleoside
  modified_base 19^20: mod_base = OTHER; note = phosphorothioate linkage
  modified_base 20^21: mod_base = OTHER; note = phosphorothioate linkage
  modified_base 1: mod_base = OTHER; note = 2-O-methyl modified nucleoside
  modified_base 2: mod_base = OTHER; note = 2-O-methyl modified nucleoside
  modified_base 3: mod_base = OTHER; note = 2-O-methyl modified nucleoside
  modified_base 19: mod_base = OTHER; note = 2-O-methyl modified nucleoside
  modified_base 20: mod_base = OTHER; note = 2-O-methyl modified nucleoside
  modified_base 17: mod_base = OTHER; note = 2-O-methyl modified nucleoside
  modified_base 16: mod_base = OTHER; note = 2-O-methyl modified nucleoside
  modified_base 14: mod_base = OTHER; note = 2-O-methyl modified nucleoside
cacttcttcaaccgcacgatt

SEQ ID NO: 4301 - RNA, 21 nt, synthetic construct
  source 1..21: mol_type = other RNA
  modified_base 5: mod_base = OTHER; note = 2-fluoro-modified nucleoside
  modified_base 6: mod_base = OTHER; note = 2-fluoro-modified nucleoside
  modified_base 9: mod_base = OTHER; note = 2-fluoro-modified nucleoside
  modified_base 19^20: mod_base = OTHER; note = phosphorothioate linkage
  modified_base 20^21: mod_base = OTHER; note = phosphorothioate linkage
  modified_base 1: mod_base = OTHER; note = 2-O-methyl modified nucleoside
  modified_base 2: mod_base = OTHER; note = 2-O-methyl modified nucleoside
  modified_base 3: mod_base = OTHER; note = 2-O-methyl modified nucleoside
  modified_base 4: mod_base = OTHER; note = 2-O-methyl modified nucleoside
  modified_base 5: mod_base = OTHER; note = 2-O-methyl modified nucleoside
  modified_base 7: mod_base = OTHER; note = 2-O-methyl modified nucleoside
  modified_base 8: mod_base = OTHER; note = 2-O-methyl modified nucleoside
  modified_base 12: mod_base = OTHER; note = 2-O-methyl modified nucleoside
cacttcttcaaccgcacgatt

SEQ ID NO: 4302 - RNA, 21 nt, synthetic construct
  source 1..21: mol_type = other RNA
  modified_base 5: mod_base = OTHER; note = 2-fluoro-modified nucleoside
  modified_base 6: mod_base = OTHER; note = 2-fluoro-modified nucleoside
  modified_base 8: mod_base = OTHER; note = 2-fluoro-modified nucleoside
  modified_base 9: mod_base = OTHER; note = 2-fluoro-modified nucleoside
  modified_base 19^20: mod_base = OTHER; note = phosphorothioate linkage
  modified_base 20^21: mod_base = OTHER; note = phosphorothioate linkage
  modified_base 1: mod_base = OTHER; note = 2-O-methyl modified nucleoside
  modified_base 2: mod_base = OTHER; note = 2-O-methyl modified nucleoside
  modified_base 11: mod_base = OTHER; note = 2-O-methyl modified nucleoside
  modified_base 12: mod_base = OTHER; note = 2-O-methyl modified nucleoside
  modified_base 14: mod_base = OTHER; note = 2-O-methyl modified nucleoside
  modified_base 15: mod_base = OTHER; note = 2-O-methyl modified nucleoside
  modified_base 16: mod_base = OTHER; note = 2-O-methyl modified nucleoside
  modified_base 18: mod_base = OTHER; note = 2-O-methyl modified nucleoside
cacttcttcaaccgcacgatt

SEQ ID NO: 4303 - RNA, 21 nt, synthetic construct
  source 1..21: mol_type = other RNA
  modified_base 5: mod_base = OTHER; note = 2-fluoro-modified nucleoside
  modified_base 6: mod_base = OTHER; note = 2-fluoro-modified nucleoside
  modified_base 7: mod_base = OTHER; note = 2-fluoro-modified nucleoside
  modified_base 8: mod_base = OTHER; note = 2-fluoro-modified nucleoside
  modified_base 9: mod_base = OTHER; note = 2-fluoro-modified nucleoside
  modified_base 19^20: mod_base = OTHER; note = phosphorothioate linkage
  modified_base 20^21: mod_base = OTHER; note = phosphorothioate linkage
  modified_base 1: mod_base = OTHER; note = 2-O-methyl modified nucleoside
  modified_base 2: mod_base = OTHER; note = 2-O-methyl modified nucleoside
  modified_base 3: mod_base = OTHER; note = 2-O-methyl modified nucleoside
cacttcttcaaccgcacgatt

SEQ ID NO: 4304 - DNA, 21 bp, synthetic construct
  misc_feature 9: note = DNA
  misc_feature 1..8: note = RNA
  misc_feature 10..21: note = RNA
  source 1..21: mol_type = other DNA
  modified_base 1..4: mod_base = OTHER; note = 2-O-methyl modified nucleoside
  modified_base 6: mod_base = OTHER; note = 2-O-methyl modified nucleoside
  modified_base 11..21: mod_base = OTHER; note = 2-O-methyl modified nucleoside
  modified_base 5: mod_base = OTHER; note = 2-fluoro-modified nucleoside
  modified_base 7..8: mod_base = OTHER; note = 2-fluoro-modified nucleoside
  modified_base 10: mod_base = OTHER; note = 2-fluoro-modified nucleoside
  modified_base 19..21: mod_base = OTHER; note = phosphorothioate linkage
acttcttcaaccgcacgaatt

SEQ ID NO: 4305 - RNA, 21 nt, synthetic construct
  source 1..21: mol_type = other RNA
  modified_base 8: mod_base = OTHER; note = 2-fluoro-modified nucleoside
  modified_base 9: mod_base = OTHER; note = 2-fluoro-modified nucleoside
  modified_base 19^20: mod_base = OTHER; note = phosphorothioate linkage
  modified_base 20^21: mod_base = OTHER; note = phosphorothioate linkage
  modified_base 7: mod_base = OTHER; note = 2-O-methyl modified nucleoside
  modified_base 6: mod_base = OTHER; note = 2-O-methyl modified nucleoside
  modified_base 5: mod_base = OTHER; note = 2-O-methyl modified nucleoside
  modified_base 1: mod_base = OTHER; note = 2-O-methyl modified nucleoside
  modified_base 2: mod_base = OTHER; note = 2-O-methyl modified nucleoside
  modified_base 3: mod_base = OTHER; note = 2-O-methyl modified nucleoside
  modified_base 10: mod_base = OTHER; note = 2-O-methyl modified nucleoside
  modified_base 11: mod_base = OTHER; note = 2-O-methyl modified nucleoside
  modified_base 13: mod_base = OTHER; note = 2-O-methyl modified nucleoside
  modified_base 15: mod_base = OTHER; note = 2-O-methyl modified nucleoside
cttcttcaaccgcacgacatt

SEQ ID NO: 4306 - DNA, 21 bp, synthetic construct
  misc_feature 9: note = DNA
  misc_feature 1..8: note = RNA
  misc_feature 10..21: note = RNA
  source 1..21: mol_type = other DNA
  modified_base 19..21: mod_base = OTHER; note = phosphorothioate linkage
  modified_base 5: mod_base = OTHER; note = 2-fluoro-modified nucleoside
  modified_base 7..8: mod_base = OTHER; note = 2-fluoro-modified nucleoside
  modified_base 10: mod_base = OTHER; note = 2-fluoro-modified nucleoside
  modified_base 1..4: mod_base = OTHER; note = 2-O-methyl modified nucleoside
  modified_base 6: mod_base = OTHER; note = 2-O-methyl modified nucleoside
  modified_base 11..21: mod_base = OTHER; note = 2-O-methyl modified nucleoside
cttcttcaaccgcacgacatt

SEQ ID NO: 4307 - RNA, 21 nt, synthetic construct
  source 1..21: mol_type = other RNA
  modified_base 6: mod_base = OTHER; note = 2-fluoro-modified nucleoside
  modified_base 9: mod_base = OTHER; note = 2-fluoro-modified nucleoside
  modified_base 10: mod_base = OTHER; note = 2-fluoro-modified nucleoside
  modified_base 19^20: mod_base = OTHER; note = phosphorothioate linkage
  modified_base 20^21: mod_base = OTHER; note = phosphorothioate linkage
  modified_base 7: mod_base = OTHER; note = 2-O-methyl modified nucleoside
  modified_base 8: mod_base = OTHER; note = 2-O-methyl modified nucleoside
  modified_base 1: mod_base = OTHER; note = 2-O-methyl modified nucleoside
  modified_base 2: mod_base = OTHER; note = 2-O-methyl modified nucleoside
  modified_base 3: mod_base = OTHER; note = 2-O-methyl modified nucleoside
  modified_base 11: mod_base = OTHER; note = 2-O-methyl modified nucleoside
  modified_base 13: mod_base = OTHER; note = 2-O-methyl modified nucleoside
  modified_base 15: mod_base = OTHER; note = 2-O-methyl modified nucleoside
  modified_base 17: mod_base = OTHER; note = 2-O-methyl modified nucleoside
  modified_base 18: mod_base = OTHER; note = 2-O-methyl modified nucleoside
ttcttcaaccgcacgacgatt

SEQ ID NO: 4308 - RNA, 21 nt, synthetic construct
  source 1..21: mol_type = other RNA
  modified_base 5: mod_base = OTHER; note = 2-fluoro-modified nucleoside
  modified_base 9: mod_base = OTHER; note = 2-fluoro-modified nucleoside
  modified_base 10: mod_base = OTHER; note = 2-fluoro-modified nucleoside
  modified_base 19^20: mod_base = OTHER; note = phosphorothioate linkage
  modified_base 20^21: mod_base = OTHER; note = phosphorothioate linkage
  modified_base 1: mod_base = OTHER; note = 2-O-methyl modified nucleoside
  modified_base 2: mod_base = OTHER; note = 2-O-methyl modified nucleoside
  modified_base 3: mod_base = OTHER; note = 2-O-methyl modified nucleoside
  modified_base 8: mod_base = OTHER; note = 2-O-methyl modified nucleoside
  modified_base 7: mod_base = OTHER; note = 2-O-methyl modified nucleoside
  modified_base 11: mod_base = OTHER; note = 2-O-methyl modified nucleoside
  modified_base 14: mod_base = OTHER; note = 2-O-methyl modified nucleoside
  modified_base 16: mod_base = OTHER; note = 2-O-methyl modified nucleoside
ttcttcaaccgcacgacgatt

SEQ ID NO: 4309 - RNA, 21 nt, synthetic construct
  source 1..21: mol_type = other RNA
  modified_base 5: mod_base = OTHER; note = 2-fluoro-modified nucleoside
  modified_base 6: mod_base = OTHER; note = 2-fluoro-modified nucleoside
  modified_base 9: mod_base = OTHER; note = 2-fluoro-modified nucleoside
  modified_base 19^20: mod_base = OTHER; note = phosphorothioate linkage
  modified_base 20^21: mod_base = OTHER; note = phosphorothioate linkage
  modified_base 1: mod_base = OTHER; note = 2-O-methyl modified nucleoside
  modified_base 2: mod_base = OTHER; note = 2-O-methyl modified nucleoside
  modified_base 3: mod_base = OTHER; note = 2-O-methyl modified nucleoside
  modified_base 4: mod_base = OTHER; note = 2-O-methyl modified nucleoside
  modified_base 11: mod_base = OTHER; note = 2-O-methyl modified nucleoside
  modified_base 12: mod_base = OTHER; note = 2-O-methyl modified nucleoside
  modified_base 14: mod_base = OTHER; note = 2-O-methyl modified nucleoside
  modified_base 16: mod_base = OTHER; note = 2-O-methyl modified nucleoside
  modified_base 18: mod_base = OTHER; note = 2-O-methyl modified nucleoside
ttcttcaaccgcacgacgatt

SEQ ID NO: 4310 - RNA, 21 nt, synthetic construct
  source 1..21: mol_type = other RNA
  modified_base 5: mod_base = OTHER; note = 2-fluoro-modified nucleoside
  modified_base 6: mod_base = OTHER; note = 2-fluoro-modified nucleoside
  modified_base 9: mod_base = OTHER; note = 2-fluoro-modified nucleoside
  modified_base 10: mod_base = OTHER; note = 2-fluoro-modified nucleoside
  modified_base 19^20: mod_base = OTHER; note = phosphorothioate linkage
  modified_base 20^21: mod_base = OTHER; note = phosphorothioate linkage
  modified_base 7: mod_base = OTHER; note = 2-O-methyl modified nucleoside
  modified_base 1: mod_base = OTHER; note = 2-O-methyl modified nucleoside
  modified_base 2: mod_base = OTHER; note = 2-O-methyl modified nucleoside
  modified_base 3: mod_base = OTHER; note = 2-O-methyl modified nucleoside
  modified_base 13: mod_base = OTHER; note = 2-O-methyl modified nucleoside
  modified_base 16: mod_base = OTHER; note = 2-O-methyl modified nucleoside
  modified_base 18: mod_base = OTHER; note = 2-O-methyl modified nucleoside
ttcttcaaccgcacgacgatt

SEQ ID NO: 4311 - RNA, 21 nt, synthetic construct
  source 1..21: mol_type = other RNA
  modified_base 8: mod_base = OTHER; note = 2-fluoro-modified nucleoside
  modified_base 9: mod_base = OTHER; note = 2-fluoro-modified nucleoside
  modified_base 11: mod_base = OTHER; note = 2-fluoro-modified nucleoside
  modified_base 19^20: mod_base = OTHER; note = phosphorothioate linkage
  modified_base 20^21: mod_base = OTHER; note = phosphorothioate linkage
  modified_base 1: mod_base = OTHER; note = 2-O-methyl modified nucleoside
  modified_base 2: mod_base = OTHER; note = 2-O-methyl modified nucleoside
  modified_base 3: mod_base = OTHER; note = 2-O-methyl modified nucleoside
  modified_base 5: mod_base = OTHER; note = 2-O-methyl modified nucleoside
  modified_base 7: mod_base = OTHER; note = 2-O-methyl modified nucleoside
  modified_base 10: mod_base = OTHER; note = 2-O-methyl modified nucleoside
  modified_base 16: mod_base = OTHER; note = 2-O-methyl modified nucleoside
  modified_base 18: mod_base = OTHER; note = 2-O-methyl modified nucleoside
tcttcaaccgcacgacggatt

SEQ ID NO: 4312 - RNA, 21 nt, synthetic construct
  source 1..21: mol_type = other RNA
  modified_base 5: mod_base = OTHER; note = 2-fluoro-modified nucleoside
  modified_base 9: mod_base = OTHER; note = 2-fluoro-modified nucleoside
  modified_base 11: mod_base = OTHER; note = 2-fluoro-modified nucleoside
  modified_base 19^20: mod_base = OTHER; note = phosphorothioate linkage
  modified_base 20^21: mod_base = OTHER; note = phosphorothioate linkage
  modified_base 4: mod_base = OTHER; note = 2-O-methyl modified nucleoside
  modified_base 3: mod_base = OTHER; note = 2-O-methyl modified nucleoside
  modified_base 1: mod_base = OTHER; note = 2-O-methyl modified nucleoside
  modified_base 10: mod_base = OTHER; note = 2-O-methyl modified nucleoside
  modified_base 12: mod_base = OTHER; note = 2-O-methyl modified nucleoside
  modified_base 14: mod_base = OTHER; note = 2-O-methyl modified nucleoside
  modified_base 18: mod_base = OTHER; note = 2-O-methyl modified nucleoside
tcttcaaccgcacgacggatt

SEQ ID NO: 4313 - RNA, 21 nt, synthetic construct
  source 1..21: mol_type = other RNA
  modified_base 5: mod_base = OTHER; note = 2-fluoro-modified nucleoside
  modified_base 8: mod_base = OTHER; note = 2-fluoro-modified nucleoside
  modified_base 9: mod_base = OTHER; note = 2-fluoro-modified nucleoside
  modified_base 19^20: mod_base = OTHER; note = phosphorothioate linkage
  modified_base 20^21: mod_base = OTHER; note = phosphorothioate linkage
  modified_base 1: mod_base = OTHER; note = 2-O-methyl modified nucleoside
  modified_base 2: mod_base = OTHER; note = 2-O-methyl modified nucleoside
  modified_base 3: mod_base = OTHER; note = 2-O-methyl modified nucleoside
  modified_base 15: mod_base = OTHER; note = 2-O-methyl modified nucleoside
  modified_base 12: mod_base = OTHER; note = 2-O-methyl modified nucleoside
tcttcaaccgcacgacggatt

SEQ ID NO: 4314 - RNA, 21 nt, synthetic construct
  source 1..21: mol_type = other RNA
  modified_base 5: mod_base = OTHER; note = 2-fluoro-modified nucleoside
  modified_base 8: mod_base = OTHER; note = 2-fluoro-modified nucleoside
  modified_base 9: mod_base = OTHER; note = 2-fluoro-modified nucleoside
  modified_base 11: mod_base = OTHER; note = 2-fluoro-modified nucleoside
  modified_base 19^20: mod_base = OTHER; note = phosphorothioate linkage
  modified_base 20^21: mod_base = OTHER; note = phosphorothioate linkage
  modified_base 1: mod_base = OTHER; note = 2-O-methyl modified nucleoside
  modified_base 2: mod_base = OTHER; note = 2-O-methyl modified nucleoside
  modified_base 3: mod_base = OTHER; note = 2-O-methyl modified nucleoside
  modified_base 4: mod_base = OTHER; note = 2-O-methyl modified nucleoside
  modified_base 8: mod_base = OTHER; note = 2-O-methyl modified nucleoside
  modified_base 12: mod_base = OTHER; note = 2-O-methyl modified nucleoside
  modified_base 14: mod_base = OTHER; note = 2-O-methyl modified nucleoside
tcttcaaccgcacgacggatt

SEQ ID NO: 4315 - DNA, 21 bp, synthetic construct
  misc_feature 9: note = DNA
  misc_feature 1..8: note = RNA
  misc_feature 10..21: note = RNA
  source 1..21: mol_type = other DNA
  modified_base 1..4: mod_base = OTHER; note = 2-O-methyl modified nucleoside
  modified_base 6: mod_base = OTHER; note = 2-O-methyl modified nucleoside
  modified_base 11..21: mod_base = OTHER; note = 2-O-methyl modified nucleoside
  modified_base 5: mod_base = OTHER; note = 2-fluoro-modified nucleoside
  modified_base 7..8: mod_base = OTHER; note = 2-fluoro-modified nucleoside
  modified_base 10: mod_base = OTHER; note = 2-fluoro-modified nucleoside
  modified_base 19..21: mod_base = OTHER; note = phosphorothioate linkage
tcgagaagtacatcccgtatt

SEQ ID NO: 4316 - RNA, 21 nt, synthetic construct
  source 1..21: mol_type = other RNA
  modified_base 6: mod_base = OTHER; note = 2-fluoro-modified nucleoside
  modified_base 9: mod_base = OTHER; note = 2-fluoro-modified nucleoside
  modified_base 10: mod_base = OTHER; note = 2-fluoro-modified nucleoside
  modified_base 19^20: mod_base = OTHER; note = phosphorothioate linkage
  modified_base 20^21: mod_base = OTHER; note = phosphorothioate linkage
tctgtgccggctacttcgatt

SEQ ID NO: 4317 - DNA, 21 bp, synthetic construct
  misc_feature 9: note = DNA
  misc_feature 1..8: note = RNA
  misc_feature 10..21: note = RNA
  source 1..21: mol_type = other DNA
  modified_base 19..21: mod_base = OTHER; note = phosphorothioate linkage
  modified_base 5: mod_base = OTHER; note = 2-fluoro-modified nucleoside
  modified_base 7..8: mod_base = OTHER; note = 2-fluoro-modified nucleoside
  modified_base 10: mod_base = OTHER; note = 2-fluoro-modified nucleoside
  modified_base 1..4: mod_base = OTHER; note = 2-O-methyl modified nucleoside
  modified_base 6: mod_base = OTHER; note = 2-O-methyl modified nucleoside
  modified_base 11..21: mod_base = OTHER; note = 2-O-methyl modified nucleoside
ctacttcgactgcaagtcatt

SEQ ID NO: 4318 - RNA, 21 nt, synthetic construct
  source 1..21: mol_type = other RNA
  modified_base 6: mod_base = OTHER; note = 2-fluoro-modified nucleoside
  modified_base 7: mod_base = OTHER; note = 2-fluoro-modified nucleoside
  modified_base 9: mod_base = OTHER; note = 2-fluoro-modified nucleoside
  modified_base 19^20: mod_base = OTHER; note = phosphorothioate linkage
  modified_base 20^21: mod_base = OTHER; note = phosphorothioate linkage
ttcgactgcaagtccgacatt

SEQ ID NO: 4319 - DNA, 21 bp, synthetic construct
  misc_feature 9: note = DNA
  misc_feature 1..8: note = RNA
  misc_feature 10..21: note = RNA
  source 1..21: mol_type = other DNA
  modified_base 19..21: mod_base = OTHER; note = phosphorothioate linkage
  modified_base 5: mod_base = OTHER; note = 2-fluoro-modified nucleoside
  modified_base 7..8: mod_base = OTHER; note = 2-fluoro-modified nucleoside
  modified_base 10: mod_base = OTHER; note = 2-fluoro-modified nucleoside
  modified_base 1..4: mod_base = OTHER; note = 2-O-methyl modified nucleoside
  modified_base 6: mod_base = OTHER; note = 2-O-methyl modified nucleoside
  modified_base 11..21: mod_base = OTHER; note = 2-O-methyl modified nucleoside
ttacctctacggcatcatatt

SEQ ID NO: 4320 - RNA, 21 nt, synthetic construct
  source 1..21: mol_type = other RNA
  modified_base 2: mod_base = OTHER; note = 2-fluoro-modified nucleoside
  modified_base 4: mod_base = OTHER; note = 2-fluoro-modified nucleoside
  modified_base 6: mod_base = OTHER; note = 2-fluoro-modified nucleoside
  modified_base 8: mod_base = OTHER; note = 2-fluoro-modified nucleoside
  modified_base 10: mod_base = OTHER; note = 2-fluoro-modified nucleoside
  modified_base 12: mod_base = OTHER; note = 2-fluoro-modified nucleoside
  modified_base 14: mod_base = OTHER; note = 2-fluoro-modified nucleoside
  modified_base 16: mod_base = OTHER; note = 2-fluoro-modified nucleoside
  modified_base 18: mod_base = OTHER; note = 2-fluoro-modified nucleoside
  modified_base 1^2: mod_base = OTHER; note = phosphorothioate linkage
  modified_base 2^3: mod_base = OTHER; note = phosphorothioate linkage
  modified_base 19^20: mod_base = OTHER; note = phosphorothioate linkage
  modified_base 20^21: mod_base = OTHER; note = phosphorothioate linkage
ttcgctgtggcattaggtttt

SEQ ID NO: 4321 - RNA, 21 nt, synthetic construct
  source 1..21: mol_type = other RNA
  modified_base 2: mod_base = OTHER; note = 2-fluoro-modified nucleoside
  modified_base 4: mod_base = OTHER; note = 2-fluoro-modified nucleoside
  modified_base 6: mod_base = OTHER; note = 2-fluoro-modified nucleoside
  modified_base 8: mod_base = OTHER; note = 2-fluoro-modified nucleoside
  modified_base 10: mod_base = OTHER; note = 2-fluoro-modified nucleoside
  modified_base 12: mod_base = OTHER; note = 2-fluoro-modified nucleoside
  modified_base 14: mod_base = OTHER; note = 2-fluoro-modified nucleoside
  modified_base 16: mod_base = OTHER; note = 2-fluoro-modified nucleoside
  modified_base 18: mod_base = OTHER; note = 2-fluoro-modified nucleoside
  modified_base 1^2: mod_base = OTHER; note = phosphorothioate linkage
  modified_base 2^3: mod_base = OTHER; note = phosphorothioate linkage
  modified_base 19^20: mod_base = OTHER; note = phosphorothioate linkage
  modified_base 20^21: mod_base = OTHER; note = phosphorothioate linkage
tgtgagttgtggcacaccatt

SEQ ID NO: 4322 - RNA, 21 nt, synthetic construct
  source 1..21: mol_type = other RNA
  modified_base 2: mod_base = OTHER; note = 2-fluoro-modified nucleoside
  modified_base 4: mod_base = OTHER; note = 2-fluoro-modified nucleoside
  modified_base 6: mod_base = OTHER; note = 2-fluoro-modified nucleoside
  modified_base 8: mod_base = OTHER; note = 2-fluoro-modified nucleoside
  modified_base 10: mod_base = OTHER; note = 2-fluoro-modified nucleoside
  modified_base 12: mod_base = OTHER; note = 2-fluoro-modified nucleoside
  modified_base 14: mod_base = OTHER; note = 2-fluoro-modified nucleoside
  modified_base 16: mod_base = OTHER; note = 2-fluoro-modified nucleoside
  modified_base 18: mod_base = OTHER; note = 2-fluoro-modified nucleoside
  modified_base 1^2: mod_base = OTHER; note = phosphorothioate linkage
  modified_base 2^3: mod_base = OTHER; note = phosphorothioate linkage
  modified_base 19^20: mod_base = OTHER; note = phosphorothioate linkage
  modified_base 20^21: mod_base = OTHER; note = phosphorothioate linkage
tcggtcgtagttgtgagtttt

SEQ ID NO: 4323 - RNA, 21 nt, synthetic construct
  source 1..21: mol_type = other RNA
  modified_base 2: mod_base = OTHER; note = 2-fluoro-modified nucleoside
  modified_base 4: mod_base = OTHER; note = 2-fluoro-modified nucleoside
  modified_base 6: mod_base = OTHER; note = 2-fluoro-modified nucleoside
  modified_base 8: mod_base = OTHER; note = 2-fluoro-modified nucleoside
  modified_base 10: mod_base = OTHER; note = 2-fluoro-modified nucleoside
  modified_base 12: mod_base = OTHER; note = 2-fluoro-modified nucleoside
  modified_base 14: mod_base = OTHER; note = 2-fluoro-modified nucleoside
  modified_base 16: mod_base = OTHER; note = 2-fluoro-modified nucleoside
  modified_base 18: mod_base = OTHER; note = 2-fluoro-modified nucleoside
  modified_base 1^2: mod_base = OTHER; note = phosphorothioate linkage
  modified_base 2^3: mod_base = OTHER; note = phosphorothioate linkage
  modified_base 19^20: mod_base = OTHER; note = phosphorothioate linkage
  modified_base 20^21: mod_base = OTHER; note = phosphorothioate linkage
ttcccggtcgtagttgtgatt

SEQ ID NO: 4324 - RNA, 21 nt, synthetic construct
  source 1..21: mol_type = other RNA
  modified_base 2: mod_base = OTHER; note = 2-fluoro-modified nucleoside
  modified_base 4: mod_base = OTHER; note = 2-fluoro-modified nucleoside
  modified_base 6: mod_base = OTHER; note = 2-fluoro-modified nucleoside
  modified_base 8: mod_base = OTHER; note = 2-fluoro-modified nucleoside
  modified_base 10: mod_base = OTHER; note = 2-fluoro-modified nucleoside
  modified_base 12: mod_base = OTHER; note = 2-fluoro-modified nucleoside
  modified_base 14: mod_base = OTHER; note = 2-fluoro-modified nucleoside
  modified_base 16: mod_base = OTHER; note = 2-fluoro-modified nucleoside
  modified_base 18: mod_base = OTHER; note = 2-fluoro-modified nucleoside
  modified_base 1^2: mod_base = OTHER; note = phosphorothioate linkage
  modified_base 2^3: mod_base = OTHER; note = phosphorothioate linkage
  modified_base 19^20: mod_base = OTHER; note = phosphorothioate linkage
  modified_base 20^21: mod_base = OTHER; note = phosphorothioate linkage
tgcaggaacgtcctcttcttt

SEQ ID NO: 4325 - RNA, 21 nt, synthetic construct
  source 1..21: mol_type = other RNA
  modified_base 2: mod_base = OTHER; note = 2-fluoro-modified nucleoside
  modified_base 4: mod_base = OTHER; note = 2-fluoro-modified nucleoside
  modified_base 6: mod_base = OTHER; note = 2-fluoro-modified nucleoside
  modified_base 8: mod_base = OTHER; note = 2-fluoro-modified nucleoside
  modified_base 10: mod_base = OTHER; note = 2-fluoro-modified nucleoside
  modified_base 12: mod_base = OTHER; note = 2-fluoro-modified nucleoside
  modified_base 14: mod_base = OTHER; note = 2-fluoro-modified nucleoside
  modified_base 16: mod_base = OTHER; note = 2-fluoro-modified nucleoside
  modified_base 18: mod_base = OTHER; note = 2-fluoro-modified nucleoside
  modified_base 19^20: mod_base = OTHER; note = phosphorothioate linkage
  modified_base 20^21: mod_base = OTHER; note = phosphorothioate linkage
  modified_base 1^2: mod_base = OTHER; note = phosphorothioate linkage
  modified_base 2^3: mod_base = OTHER; note = phosphorothioate linkage
ttgcggttgaagaagtgcttt

SEQ ID NO: 4326 - RNA, 21 nt, synthetic construct
  source 1..21: mol_type = other RNA
  modified_base 2: mod_base = OTHER; note = 2-fluoro-modified nucleoside
  modified_base 4: mod_base = OTHER; note = 2-fluoro-modified nucleoside
  modified_base 6: mod_base = OTHER; note = 2-fluoro-modified nucleoside
  modified_base 8: mod_base = OTHER; note = 2-fluoro-modified nucleoside
  modified_base 10: mod_base = OTHER; note = 2-fluoro-modified nucleoside
  modified_base 12: mod_base = OTHER; note = 2-fluoro-modified nucleoside
  modified_base 14: mod_base = OTHER; note = 2-fluoro-modified nucleoside
  modified_base 16: mod_base = OTHER; note = 2-fluoro-modified nucleoside
  modified_base 18: mod_base = OTHER; note = 2-fluoro-modified nucleoside
  modified_base 1^2: mod_base = OTHER; note = phosphorothioate linkage
  modified_base 2^3: mod_base = OTHER; note = phosphorothioate linkage
  modified_base 19^20: mod_base = OTHER; note = phosphorothioate linkage
  modified_base 20^21: mod_base = OTHER; note = phosphorothioate linkage
tcgtgcggttgaagaagtgtt

SEQ ID NO: 4327 - RNA, 21 nt, synthetic construct
  source 1..21: mol_type = other RNA
  modified_base 2: mod_base = OTHER; note = 2-fluoro-modified nucleoside
  modified_base 4: mod_base = OTHER; note = 2-fluoro-modified nucleoside
  modified_base 6: mod_base = OTHER; note = 2-fluoro-modified nucleoside
  modified_base 8: mod_base = OTHER; note = 2-fluoro-modified nucleoside
  modified_base 10: mod_base = OTHER; note = 2-fluoro-modified nucleoside
  modified_base 12: mod_base = OTHER; note = 2-fluoro-modified nucleoside
  modified_base 14: mod_base = OTHER; note = 2-fluoro-modified nucleoside
  modified_base 16: mod_base = OTHER; note = 2-fluoro-modified nucleoside
  modified_base 18: mod_base = OTHER; note = 2-fluoro-modified nucleoside
  modified_base 1^2: mod_base = OTHER; note = phosphorothioate linkage
  modified_base 2^3: mod_base = OTHER; note = phosphorothioate linkage
  modified_base 19^20: mod_base = OTHER; note = phosphorothioate linkage
  modified_base 20^21: mod_base = OTHER; note = phosphorothioate linkage
tgtcgtgcggttgaagaagtt

SEQ ID NO: 4328 - RNA, 21 nt, synthetic construct
  source 1..21: mol_type = other RNA
  modified_base 2: mod_base = OTHER; note = 2-fluoro-modified nucleoside
  modified_base 4: mod_base = OTHER; note = 2-fluoro-modified nucleoside
  modified_base 6: mod_base = OTHER; note = 2-fluoro-modified nucleoside
  modified_base 8: mod_base = OTHER; note = 2-fluoro-modified nucleoside
  modified_base 10: mod_base = OTHER; note = 2-fluoro-modified nucleoside
  modified_base 12: mod_base = OTHER; note = 2-fluoro-modified nucleoside
  modified_base 14: mod_base = OTHER; note = 2-fluoro-modified nucleoside
  modified_base 16: mod_base = OTHER; note = 2-fluoro-modified nucleoside
  modified_base 18: mod_base = OTHER; note = 2-fluoro-modified nucleoside
  modified_base 1^2: mod_base = OTHER; note = phosphorothioate linkage
  modified_base 2^3: mod_base = OTHER; note = phosphorothioate linkage
  modified_base 19^20: mod_base = OTHER; note = phosphorothioate linkage
  modified_base 20^21: mod_base = OTHER; note = phosphorothioate linkage
tcgtcgtgcggttgaagaatt

SEQ ID NO: 4329 - RNA, 21 nt, synthetic construct
  source 1..21: mol_type = other RNA
  modified_base 2: mod_base = OTHER; note = 2-fluoro-modified nucleoside
  modified_base 4: mod_base = OTHER; note = 2-fluoro-modified nucleoside
  modified_base 6: mod_base = OTHER; note = 2-fluoro-modified nucleoside
  modified_base 9: mod_base = OTHER; note = 2-fluoro-modified nucleoside
  modified_base 10: mod_base = OTHER; note = 2-fluoro-modified nucleoside
  modified_base 12: mod_base = OTHER; note = 2-fluoro-modified nucleoside
  modified_base 14: mod_base = OTHER; note = 2-fluoro-modified nucleoside
  modified_base 16: mod_base = OTHER; note = 2-fluoro-modified nucleoside
  modified_base 18: mod_base = OTHER; note = 2-fluoro-modified nucleoside
  modified_base 1^2: mod_base = OTHER; note = phosphorothioate linkage
  modified_base 2^3: mod_base = OTHER; note = phosphorothioate linkage
  modified_base 19^20: mod_base = OTHER; note = phosphorothioate linkage
  modified_base 20^21: mod_base = OTHER; note = phosphorothioate linkage
tccgtcgtgcggttgaagatt

SEQ ID NO: 4330 - RNA, 21 nt, synthetic construct
  source 1..21: mol_type = other RNA
  modified_base 2: mod_base = OTHER; note = 2-fluoro-modified nucleoside
  modified_base 4: mod_base = OTHER; note = 2-fluoro-modified nucleoside
  modified_base 6: mod_base = OTHER; note = 2-fluoro-modified nucleoside
  modified_base 8: mod_base = OTHER; note = 2-fluoro-modified nucleoside
  modified_base 10: mod_base = OTHER; note = 2-fluoro-modified nucleoside
  modified_base 12: mod_base = OTHER; note = 2-fluoro-modified nucleoside
  modified_base 14: mod_base = OTHER; note = 2-fluoro-modified nucleoside
  modified_base 16: mod_base = OTHER; note = 2-fluoro-modified nucleoside
  modified_base 18: mod_base = OTHER; note = 2-fluoro-modified nucleoside
  modified_base 1^2: mod_base = OTHER; note = phosphorothioate linkage
  modified_base 2^3: mod_base = OTHER; note = phosphorothioate linkage
  modified_base 19^20: mod_base = OTHER; note = phosphorothioate linkage
  modified_base 20^21: mod_base = OTHER; note = phosphorothioate linkage
tcgaagtagccggcacagatt

SEQ ID NO: 4331 - RNA, 21 nt, synthetic construct
  source 1..21: mol_type = other RNA
  modified_base 2: mod_base = OTHER; note = 2-fluoro-modified nucleoside
  modified_base 4: mod_base = OTHER; note = 2-fluoro-modified nucleoside
  modified_base 6: mod_base = OTHER; note = 2-fluoro-modified nucleoside
  modified_base 8: mod_base = OTHER; note = 2-fluoro-modified nucleoside
  modified_base 10: mod_base = OTHER; note = 2-fluoro-modified nucleoside
  modified_base 12: mod_base = OTHER; note = 2-fluoro-modified nucleoside
  modified_base 14: mod_base = OTHER; note = 2-fluoro-modified nucleoside
  modified_base 16: mod_base = OTHER; note = 2-fluoro-modified nucleoside
  modified_base 18: mod_base = OTHER; note = 2-fluoro-modified nucleoside
  modified_base 1^2: mod_base = OTHER; note = phosphorothioate linkage
  modified_base 2^3: mod_base = OTHER; note = phosphorothioate linkage
  modified_base 19^20: mod_base = OTHER; note = phosphorothioate linkage
  modified_base 20^21: mod_base = OTHER; note = phosphorothioate linkage
tgtcggacttgcagtcgaatt

SEQ ID NO: 4332 - RNA, 21 nt, synthetic construct
  source 1..21: mol_type = other RNA
  modified_base 4: mod_base = OTHER; note = 2-fluoro-modified nucleoside
  modified_base 6: mod_base = OTHER; note = 2-fluoro-modified nucleoside
  modified_base 8: mod_base = OTHER; note = 2-fluoro-modified nucleoside
  modified_base 10: mod_base = OTHER; note = 2-fluoro-modified nucleoside
  modified_base 12: mod_base = OTHER; note = 2-fluoro-modified nucleoside
  modified_base 14: mod_base = OTHER; note = 2-fluoro-modified nucleoside
  modified_base 16: mod_base = OTHER; note = 2-fluoro-modified nucleoside
  modified_base 18: mod_base = OTHER; note = 2-fluoro-modified nucleoside
  modified_base 19^20: mod_base = OTHER; note = phosphorothioate linkage
  modified_base 20^21: mod_base = OTHER; note = phosphorothioate linkage
ttcgctgtggcattaggtttt

SEQ ID NO: 4333 - RNA, 21 nt, synthetic construct
  source 1..21: mol_type = other RNA
  modified_base 4: mod_base = OTHER; note = 2-fluoro-modified nucleoside
  modified_base 6: mod_base = OTHER; note = 2-fluoro-modified nucleoside
  modified_base 8: mod_base = OTHER; note = 2-fluoro-modified nucleoside
  modified_base 10: mod_base = OTHER; note = 2-fluoro-modified nucleoside
  modified_base 12: mod_base = OTHER; note = 2-fluoro-modified nucleoside
  modified_base 14: mod_base = OTHER; note = 2-fluoro-modified nucleoside
  modified_base 16: mod_base = OTHER; note = 2-fluoro-modified nucleoside
  modified_base 18: mod_base = OTHER; note = 2-fluoro-modified nucleoside
  modified_base 19^20: mod_base = OTHER; note = phosphorothioate linkage
  modified_base 20^21: mod_base = OTHER; note = phosphorothioate linkage
tagaggtcaccaggatagttt

SEQ ID NO: 4334 - RNA, 21 nt, synthetic construct
  source 1..21: mol_type = other RNA
  modified_base 2: mod_base = OTHER; note = 2-fluoro-modified nucleoside
  modified_base 4: mod_base = OTHER; note = 2-fluoro-modified nucleoside
  modified_base 6: mod_base = OTHER; note = 2-fluoro-modified nucleoside
  modified_base 8: mod_base = OTHER; note = 2-fluoro-modified nucleoside
  modified_base 10: mod_base = OTHER; note = 2-fluoro-modified nucleoside
  modified_base 12: mod_base = OTHER; note = 2-fluoro-modified nucleoside
  modified_base 14: mod_base = OTHER; note = 2-fluoro-modified nucleoside
  modified_base 16: mod_base = OTHER; note = 2-fluoro-modified nucleoside
  modified_base 18: mod_base = OTHER; note = 2-fluoro-modified nucleoside
  modified_base 19^20: mod_base = OTHER; note = phosphorothioate linkage
  modified_base 20^21: mod_base = OTHER; note = phosphorothioate linkage
tgtgagttgtggcacaccatt

SEQ ID NO: 4335 - RNA, 21 nt, synthetic construct
  source 1..21: mol_type = other RNA
  modified_base 4: mod_base = OTHER; note = 2-fluoro-modified nucleoside
  modified_base 6: mod_base = OTHER; note = 2-fluoro-modified nucleoside
  modified_base 8: mod_base = OTHER; note = 2-fluoro-modified nucleoside
  modified_base 10: mod_base = OTHER; note = 2-fluoro-modified nucleoside
  modified_base 12: mod_base = OTHER; note = 2-fluoro-modified nucleoside
  modified_base 14: mod_base = OTHER; note = 2-fluoro-modified nucleoside
  modified_base 16: mod_base = OTHER; note = 2-fluoro-modified nucleoside
  modified_base 18: mod_base = OTHER; note = 2-fluoro-modified nucleoside
  modified_base 19^20: mod_base = OTHER; note = phosphorothioate linkage
  modified_base 20^21: mod_base = OTHER; note = phosphorothioate linkage
tgttgtgagttgtggcacatt

SEQ ID NO: 4336 - RNA, 21 nt, synthetic construct
  source 1..21: mol_type = other RNA
  modified_base 4: mod_base = OTHER; note = 2-fluoro-modified nucleoside
  modified_base 6: mod_base = OTHER; note = 2-fluoro-modified nucleoside
  modified_base 8: mod_base = OTHER; note = 2-fluoro-modified nucleoside
  modified_base 10: mod_base = OTHER; note = 2-fluoro-modified nucleoside
  modified_base 12: mod_base = OTHER; note = 2-fluoro-modified nucleoside
  modified_base 14: mod_base = OTHER; note = 2-fluoro-modified nucleoside
  modified_base 16: mod_base = OTHER; note = 2-fluoro-modified nucleoside
  modified_base 18: mod_base = OTHER; note = 2-fluoro-modified nucleoside
  modified_base 19^20: mod_base = OTHER; note = phosphorothioate linkage
  modified_base 20^21: mod_base = OTHER; note = phosphorothioate linkage
tgtcgtagttgtgagttgttt

SEQ ID NO: 4337 - RNA, 21 nt, synthetic construct
  source 1..21: mol_type = other RNA
  modified_base 4: mod_base = OTHER; note = 2-fluoro-modified nucleoside
  modified_base 6: mod_base = OTHER; note = 2-fluoro-modified nucleoside2-fluoro-modified nucleoside
  modified_base 8: mod_base = OTHER; note = 2-fluoro-modified nucleoside
  modified_base 10: mod_base = OTHER; note = 2-fluoro-modified nucleoside
  modified_base 12: mod_base = OTHER; note = 2-fluoro-modified nucleoside
  modified_base 14: mod_base = OTHER; note = 2-fluoro-modified nucleoside
  modified_base 16: mod_base = OTHER; note = 2-fluoro-modified nucleoside
  modified_base 18: mod_base = OTHER; note = 2-fluoro-modified nucleoside
  modified_base 19^20: mod_base = OTHER; note = phosphorothioate linkage
  modified_base 20^21: mod_base = OTHER; note = phosphorothioate linkage
tcggtcgtagttgtgagtttt

SEQ ID NO: 4338 - RNA, 21 nt, synthetic construct
  source 1..21: mol_type = other RNA
  modified_base 2: mod_base = OTHER; note = 2-fluoro-modified nucleoside
  modified_base 4: mod_base = OTHER; note = 2-fluoro-modified nucleoside
  modified_base 6: mod_base = OTHER; note = 2-fluoro-modified nucleoside
  modified_base 8: mod_base = OTHER; note = 2-fluoro-modified nucleoside
  modified_base 10: mod_base = OTHER; note = 2-fluoro-modified nucleoside
  modified_base 12: mod_base = OTHER; note = 2-fluoro-modified nucleoside
  modified_base 14: mod_base = OTHER; note = 2-fluoro-modified nucleoside
  modified_base 16: mod_base = OTHER; note = 2-fluoro-modified nucleoside
  modified_base 18: mod_base = OTHER; note = 2-fluoro-modified nucleoside
  modified_base 19^20: mod_base = OTHER; note = phosphorothioate linkage
  modified_base 20^21: mod_base = OTHER; note = phosphorothioate linkage
ttcccggtcgtagttgtgatt

SEQ ID NO: 4339 - RNA, 21 nt, synthetic construct
  source 1..21: mol_type = other RNA
  modified_base 4: mod_base = OTHER; note = 2-fluoro-modified nucleoside
  modified_base 6: mod_base = OTHER; note = 2-fluoro-modified nucleoside
  modified_base 8: mod_base = OTHER; note = 2-fluoro-modified nucleoside
  modified_base 10: mod_base = OTHER; note = 2-fluoro-modified nucleoside
  modified_base 12: mod_base = OTHER; note = 2-fluoro-modified nucleoside
  modified_base 14: mod_base = OTHER; note = 2-fluoro-modified nucleoside
  modified_base 16: mod_base = OTHER; note = 2-fluoro-modified nucleoside
  modified_base 18: mod_base = OTHER; note = 2-fluoro-modified nucleoside
  modified_base 19^20: mod_base = OTHER; note = phosphorothioate linkage
  modified_base 20^21: mod_base = OTHER; note = phosphorothioate linkage
tgcaggaacgtcctcttcttt

SEQ ID NO: 4340 - RNA, 21 nt, synthetic construct
  source 1..21: mol_type = other RNA
  modified_base 4: mod_base = OTHER; note = 2-fluoro-modified nucleoside
  modified_base 6: mod_base = OTHER; note = 2-fluoro-modified nucleoside
  modified_base 8: mod_base = OTHER; note = 2-fluoro-modified nucleoside
  modified_base 10: mod_base = OTHER; note = 2-fluoro-modified nucleoside
  modified_base 12: mod_base = OTHER; note = 2-fluoro-modified nucleoside
  modified_base 14: mod_base = OTHER; note = 2-fluoro-modified nucleoside
  modified_base 16: mod_base = OTHER; note = 2-fluoro-modified nucleoside
  modified_base 18: mod_base = OTHER; note = 2-fluoro-modified nucleoside
  modified_base 19^20: mod_base = OTHER; note = phosphorothioate linkage
  modified_base 20^21: mod_base = OTHER; note = phosphorothioate linkage
ttgcggttgaagaagtgcttt

SEQ ID NO: 4341 - RNA, 21 nt, synthetic construct
  source 1..21: mol_type = other RNA
  modified_base 4: mod_base = OTHER; note = 2-fluoro-modified nucleoside
  modified_base 6: mod_base = OTHER; note = 2-fluoro-modified nucleoside
  modified_base 8: mod_base = OTHER; note = 2-fluoro-modified nucleoside
  modified_base 10: mod_base = OTHER; note = 2-fluoro-modified nucleoside
  modified_base 12: mod_base = OTHER; note = 2-fluoro-modified nucleoside
  modified_base 14: mod_base = OTHER; note = 2-fluoro-modified nucleoside
  modified_base 16: mod_base = OTHER; note = 2-fluoro-modified nucleoside
  modified_base 18: mod_base = OTHER; note = 2-fluoro-modified nucleoside
  modified_base 19^20: mod_base = OTHER; note = phosphorothioate linkage
  modified_base 20^21: mod_base = OTHER; note = phosphorothioate linkage
tcgtgcggttgaagaagtgtt

SEQ ID NO: 4342 - RNA, 21 nt, synthetic construct
  source 1..21: mol_type = other RNA
  modified_base 4: mod_base = OTHER; note = 2-fluoro-modified nucleoside
  modified_base 6: mod_base = OTHER; note = 2-fluoro-modified nucleoside
  modified_base 8: mod_base = OTHER; note = 2-fluoro-modified nucleoside
  modified_base 10: mod_base = OTHER; note = 2-fluoro-modified nucleoside
  modified_base 12: mod_base = OTHER; note = 2-fluoro-modified nucleoside
  modified_base 14: mod_base = OTHER; note = 2-fluoro-modified nucleoside
  modified_base 16: mod_base = OTHER; note = 2-fluoro-modified nucleoside
  modified_base 18: mod_base = OTHER; note = 2-fluoro-modified nucleoside
  modified_base 19^20: mod_base = OTHER; note = phosphorothioate linkage
  modified_base 20^21: mod_base = OTHER; note = phosphorothioate linkage
ttcgtgcggttgaagaagttt

SEQ ID NO: 4343 - RNA, 21 nt, synthetic construct
  source 1..21: mol_type = other RNA
  modified_base 4: mod_base = OTHER; note = 2-fluoro-modified nucleoside
  modified_base 6: mod_base = OTHER; note = 2-fluoro-modified nucleoside
  modified_base 8: mod_base = OTHER; note = 2-fluoro-modified nucleoside
  modified_base 10: mod_base = OTHER; note = 2-fluoro-modified nucleoside
  modified_base 12: mod_base = OTHER; note = 2-fluoro-modified nucleoside
  modified_base 14: mod_base = OTHER; note = 2-fluoro-modified nucleoside
  modified_base 16: mod_base = OTHER; note = 2-fluoro-modified nucleoside
  modified_base 18: mod_base = OTHER; note = 2-fluoro-modified nucleoside
  modified_base 19^20: mod_base = OTHER; note = phosphorothioate linkage
  modified_base 20^21: mod_base = OTHER; note = phosphorothioate linkage
tgtcgtgcggttgaagaagtt

SEQ ID NO: 4344 - RNA, 21 nt, synthetic construct
  source 1..21: mol_type = other RNA
  modified_base 4: mod_base = OTHER; note = 2-fluoro-modified nucleoside
  modified_base 6: mod_base = OTHER; note = 2-fluoro-modified nucleoside
  modified_base 8: mod_base = OTHER; note = 2-fluoro-modified nucleoside
  modified_base 10: mod_base = OTHER; note = 2-fluoro-modified nucleoside
  modified_base 12: mod_base = OTHER; note = 2-fluoro-modified nucleoside
  modified_base 14: mod_base = OTHER; note = 2-fluoro-modified nucleoside
  modified_base 16: mod_base = OTHER; note = 2-fluoro-modified nucleoside
  modified_base 18: mod_base = OTHER; note = 2-fluoro-modified nucleoside
  modified_base 19^20: mod_base = OTHER; note = phosphorothioate linkage
  modified_base 20^21: mod_base = OTHER; note = phosphorothioate linkage
tcgtcgtgcggttgaagaatt

SEQ ID NO: 4345 - RNA, 21 nt, synthetic construct
  source 1..21: mol_type = other RNA
  modified_base 4: mod_base = OTHER; note = 2-fluoro-modified nucleoside
  modified_base 6: mod_base = OTHER; note = 2-fluoro-modified nucleoside
  modified_base 8: mod_base = OTHER; note = 2-fluoro-modified nucleoside
  modified_base 10: mod_base = OTHER; note = 2-fluoro-modified nucleoside
  modified_base 12: mod_base = OTHER; note = 2-fluoro-modified nucleoside
  modified_base 14: mod_base = OTHER; note = 2-fluoro-modified nucleoside
  modified_base 16: mod_base = OTHER; note = 2-fluoro-modified nucleoside
  modified_base 18: mod_base = OTHER; note = 2-fluoro-modified nucleoside
  modified_base 19^20: mod_base = OTHER; note = phosphorothioate linkage
  modified_base 20^21: mod_base = OTHER; note = phosphorothioate linkage
tccgtcgtgcggttgaagatt

SEQ ID NO: 4346 - RNA, 21 nt, synthetic construct
  source 1..21: mol_type = other RNA
  modified_base 4: mod_base = OTHER; note = 2-fluoro-modified nucleoside
  modified_base 6: mod_base = OTHER; note = 2-fluoro-modified nucleoside
  modified_base 8: mod_base = OTHER; note = 2-fluoro-modified nucleoside
  modified_base 10: mod_base = OTHER; note = 2-fluoro-modified nucleoside
  modified_base 12: mod_base = OTHER; note = 2-fluoro-modified nucleoside
  modified_base 14: mod_base = OTHER; note = 2-fluoro-modified nucleoside
  modified_base 16: mod_base = OTHER; note = 2-fluoro-modified nucleoside
  modified_base 18: mod_base = OTHER; note = 2-fluoro-modified nucleoside
  modified_base 19^20: mod_base = OTHER; note = phosphorothioate linkage
  modified_base 20^21: mod_base = OTHER; note = phosphorothioate linkage
tgtacttctcgatgccgaatt

SEQ ID NO: 4347 - RNA, 21 nt, synthetic construct
  source 1..21: mol_type = other RNA
  modified_base 4: mod_base = OTHER; note = 2-fluoro-modified nucleoside
  modified_base 6: mod_base = OTHER; note = 2-fluoro-modified nucleoside
  modified_base 8: mod_base = OTHER; note = 2-fluoro-modified nucleoside
  modified_base 10: mod_base = OTHER; note = 2-fluoro-modified nucleoside
  modified_base 12: mod_base = OTHER; note = 2-fluoro-modified nucleoside
  modified_base 14: mod_base = OTHER; note = 2-fluoro-modified nucleoside
  modified_base 16: mod_base = OTHER; note = 2-fluoro-modified nucleoside
  modified_base 18: mod_base = OTHER; note = 2-fluoro-modified nucleoside
  modified_base 19^20: mod_base = OTHER; note = phosphorothioate linkage
  modified_base 20^21: mod_base = OTHER; note = phosphorothioate linkage
tcgggatgtacttctcgattt

SEQ ID NO: 4348 - RNA, 21 nt, synthetic construct
  source 1..21: mol_type = other RNA
  modified_base 4: mod_base = OTHER; note = 2-fluoro-modified nucleoside
  modified_base 6: mod_base = OTHER; note = 2-fluoro-modified nucleoside
  modified_base 8: mod_base = OTHER; note = 2-fluoro-modified nucleoside
  modified_base 10: mod_base = OTHER; note = 2-fluoro-modified nucleoside
  modified_base 12: mod_base = OTHER; note = 2-fluoro-modified nucleoside
  modified_base 14: mod_base = OTHER; note = 2-fluoro-modified nucleoside
  modified_base 16: mod_base = OTHER; note = 2-fluoro-modified nucleoside
  modified_base 18: mod_base = OTHER; note = 2-fluoro-modified nucleoside
  modified_base 19^20: mod_base = OTHER; note = phosphorothioate linkage
  modified_base 20^21: mod_base = OTHER; note = phosphorothioate linkage
tacgggatgtacttctcgatt

SEQ ID NO: 4349 - RNA, 21 nt, synthetic construct
  source 1..21: mol_type = other RNA
  modified_base 4: mod_base = OTHER; note = 2-fluoro-modified nucleoside
  modified_base 6: mod_base = OTHER; note = 2-fluoro-modified nucleoside
  modified_base 8: mod_base = OTHER; note = 2-fluoro-modified nucleoside
  modified_base 10: mod_base = OTHER; note = 2-fluoro-modified nucleoside
  modified_base 12: mod_base = OTHER; note = 2-fluoro-modified nucleoside
  modified_base 14: mod_base = OTHER; note = 2-fluoro-modified nucleoside
  modified_base 16: mod_base = OTHER; note = 2-fluoro-modified nucleoside
  modified_base 18: mod_base = OTHER; note = 2-fluoro-modified nucleoside
  modified_base 19^20: mod_base = OTHER; note = phosphorothioate linkage
  modified_base 20^21: mod_base = OTHER; note = phosphorothioate linkage
tgtgtacgggatgtacttctt

SEQ ID NO: 4350 - RNA, 21 nt, synthetic construct
  source 1..21: mol_type = other RNA
  modified_base 4: mod_base = OTHER; note = 2-fluoro-modified nucleoside
  modified_base 6: mod_base = OTHER; note = 2-fluoro-modified nucleoside
  modified_base 8: mod_base = OTHER; note = 2-fluoro-modified nucleoside
  modified_base 10: mod_base = OTHER; note = 2-fluoro-modified nucleoside
  modified_base 12: mod_base = OTHER; note = 2-fluoro-modified nucleoside
  modified_base 14: mod_base = OTHER; note = 2-fluoro-modified nucleoside
  modified_base 16: mod_base = OTHER; note = 2-fluoro-modified nucleoside
  modified_base 18: mod_base = OTHER; note = 2-fluoro-modified nucleoside
  modified_base 19^20: mod_base = OTHER; note = phosphorothioate linkage
  modified_base 20^21: mod_base = OTHER; note = phosphorothioate linkage
tcgaagtagccggcacagatt

SEQ ID NO: 4351 - RNA, 21 nt, synthetic construct
  source 1..21: mol_type = other RNA
  modified_base 4: mod_base = OTHER; note = 2-fluoro-modified nucleoside
  modified_base 6: mod_base = OTHER; note = 2-fluoro-modified nucleoside
  modified_base 8: mod_base = OTHER; note = 2-fluoro-modified nucleoside
  modified_base 10: mod_base = OTHER; note = 2-fluoro-modified nucleoside
  modified_base 12: mod_base = OTHER; note = 2-fluoro-modified nucleoside
  modified_base 14: mod_base = OTHER; note = 2-fluoro-modified nucleoside
  modified_base 16: mod_base = OTHER; note = 2-fluoro-modified nucleoside
  modified_base 18: mod_base = OTHER; note = 2-fluoro-modified nucleoside
  modified_base 19^20: mod_base = OTHER; note = phosphorothioate linkage
  modified_base 20^21: mod_base = OTHER; note = phosphorothioate linkage
tgacttgcagtcgaagtagtt

SEQ ID NO: 4352 - RNA, 21 nt, synthetic construct
  source 1..21: mol_type = other RNA
  modified_base 4: mod_base = OTHER; note = 2-fluoro-modified nucleoside
  modified_base 6: mod_base = OTHER; note = 2-fluoro-modified nucleoside
  modified_base 8: mod_base = OTHER; note = 2-fluoro-modified nucleoside
  modified_base 10: mod_base = OTHER; note = 2-fluoro-modified nucleoside
  modified_base 12: mod_base = OTHER; note = 2-fluoro-modified nucleoside
  modified_base 14: mod_base = OTHER; note = 2-fluoro-modified nucleoside
  modified_base 16: mod_base = OTHER; note = 2-fluoro-modified nucleoside
  modified_base 18: mod_base = OTHER; note = 2-fluoro-modified nucleoside
  modified_base 19^20: mod_base = OTHER; note = phosphorothioate linkage
  modified_base 20^21: mod_base = OTHER; note = phosphorothioate linkage
tcggacttgcagtcgaagttt

SEQ ID NO: 4353 - RNA, 21 nt, synthetic construct
  source 1..21: mol_type = other RNA
  modified_base 4: mod_base = OTHER; note = 2-fluoro-modified nucleoside
  modified_base 6: mod_base = OTHER; note = 2-fluoro-modified nucleoside
  modified_base 8: mod_base = OTHER; note = 2-fluoro-modified nucleoside
  modified_base 10: mod_base = OTHER; note = 2-fluoro-modified nucleoside
  modified_base 12: mod_base = OTHER; note = 2-fluoro-modified nucleoside
  modified_base 14: mod_base = OTHER; note = 2-fluoro-modified nucleoside
  modified_base 16: mod_base = OTHER; note = 2-fluoro-modified nucleoside
  modified_base 18: mod_base = OTHER; note = 2-fluoro-modified nucleoside
  modified_base 19^20: mod_base = OTHER; note = phosphorothioate linkage
  modified_base 20^21: mod_base = OTHER; note = phosphorothioate linkage
tgtcggacttgcagtcgaatt

SEQ ID NO: 4354 - RNA, 21 nt, synthetic construct
  source 1..21: mol_type = other RNA
  modified_base 4: mod_base = OTHER; note = 2-fluoro-modified nucleoside
  modified_base 6: mod_base = OTHER; note = 2-fluoro-modified nucleoside
  modified_base 8: mod_base = OTHER; note = 2-fluoro-modified nucleoside
  modified_base 10: mod_base = OTHER; note = 2-fluoro-modified nucleoside
  modified_base 12: mod_base = OTHER; note = 2-fluoro-modified nucleoside
  modified_base 14: mod_base = OTHER; note = 2-fluoro-modified nucleoside
  modified_base 14: mod_base = OTHER; note = 2-fluoro-modified nucleoside
  modified_base 16: mod_base = OTHER; note = 2-fluoro-modified nucleoside
  modified_base 18: mod_base = OTHER; note = 2-fluoro-modified nucleoside
  modified_base 19^20: mod_base = OTHER; note = phosphorothioate linkage
  modified_base 20^21: mod_base = OTHER; note = phosphorothioate linkage
tatgatgccgtagaggtaatt

SEQ ID NO: 4355 - RNA, 21 nt, synthetic construct
  source 1..21: mol_type = other RNA
  modified_base 8: mod_base = OTHER; note = 2-fluoro-modified nucleoside
  modified_base 9: mod_base = OTHER; note = 2-fluoro-modified nucleoside
  modified_base 11: mod_base = OTHER; note = 2-fluoro-modified nucleoside
  modified_base 19^20: mod_base = OTHER; note = phosphorothioate linkage
  modified_base 20^21: mod_base = OTHER; note = phosphorothioate linkage
  modified_base 7: mod_base = OTHER; note = 2-O-methyl modified nucleoside
  modified_base 1: mod_base = OTHER; note = 2-O-methyl modified nucleoside
  modified_base 2: mod_base = OTHER; note = 2-O-methyl modified nucleoside
  modified_base 3: mod_base = OTHER; note = 2-O-methyl modified nucleoside
  modified_base 12: mod_base = OTHER; note = 2-O-methyl modified nucleoside
  modified_base 13: mod_base = OTHER; note = 2-O-methyl modified nucleoside
  modified_base 17: mod_base = OTHER; note = 2-O-methyl modified nucleoside
cggcacagagaaatgcttatt

SEQ ID NO: 4356 - RNA, 21 nt, synthetic construct
  source 1..21: mol_type = other RNA
  modified_base 8: mod_base = OTHER; note = 2-fluoro-modified nucleoside
  modified_base 9: mod_base = OTHER; note = 2-fluoro-modified nucleoside
  modified_base 10: mod_base = OTHER; note = 2-fluoro-modified nucleoside
  modified_base 11: mod_base = OTHER; note = 2-fluoro-modified nucleoside
  modified_base 19^20: mod_base = OTHER; note = phosphorothioate linkage
  modified_base 20^21: mod_base = OTHER; note = phosphorothioate linkage
  modified_base 7: mod_base = OTHER; note = 2-O-methyl modified nucleoside
  modified_base 1: mod_base = OTHER; note = 2-O-methyl modified nucleoside
  modified_base 2: mod_base = OTHER; note = 2-O-methyl modified nucleoside
  modified_base 4: mod_base = OTHER; note = 2-O-methyl modified nucleoside
  modified_base 15: mod_base = OTHER; note = 2-O-methyl modified nucleoside
  modified_base 12: mod_base = OTHER; note = 2-O-methyl modified nucleoside
cggcacagagaaatgcttatt

SEQ ID NO: 4357 - RNA, 21 nt, synthetic construct
  source 1..21: mol_type = other RNA
  modified_base 7: mod_base = OTHER; note = 2-fluoro-modified nucleoside
  modified_base 9: mod_base = OTHER; note = 2-fluoro-modified nucleoside
  modified_base 11: mod_base = OTHER; note = 2-fluoro-modified nucleoside
  modified_base 19^20: mod_base = OTHER; note = phosphorothioate linkage
  modified_base 20^21: mod_base = OTHER; note = phosphorothioate linkage
  modified_base 6: mod_base = OTHER; note = 2-O-methyl modified nucleoside
  modified_base 5: mod_base = OTHER; note = 2-O-methyl modified nucleoside
  modified_base 4: mod_base = OTHER; note = 2-O-methyl modified nucleoside
  modified_base 1: mod_base = OTHER; note = 2-O-methyl modified nucleoside
  modified_base 13: mod_base = OTHER; note = 2-O-methyl modified nucleoside
  modified_base 15: mod_base = OTHER; note = 2-O-methyl modified nucleoside
cggcacagagaaatgcttatt

SEQ ID NO: 4358 - RNA, 21 nt, synthetic construct
  source 1..21: mol_type = other RNA
  modified_base 7: mod_base = OTHER; note = 2-fluoro-modified nucleoside
  modified_base 8: mod_base = OTHER; note = 2-fluoro-modified nucleoside
  modified_base 9: mod_base = OTHER; note = 2-fluoro-modified nucleoside
  modified_base 10: mod_base = OTHER; note = 2-fluoro-modified nucleoside
  modified_base 19^20: mod_base = OTHER; note = phosphorothioate linkage
  modified_base 20^21: mod_base = OTHER; note = phosphorothioate linkage
  modified_base 19: mod_base = OTHER; note = 2-O-methyl modified nucleoside
  modified_base 17: mod_base = OTHER; note = 2-O-methyl modified nucleoside
  modified_base 16: mod_base = OTHER; note = 2-O-methyl modified nucleoside
  modified_base 12: mod_base = OTHER; note = 2-O-methyl modified nucleoside
  modified_base 1: mod_base = OTHER; note = 2-O-methyl modified nucleoside
  modified_base 2: mod_base = OTHER; note = 2-O-methyl modified nucleoside
cggcacagagaaatgcttatt

SEQ ID NO: 4359 - RNA, 21 nt, synthetic construct
  source 1..21: mol_type = other RNA
  modified_base 7: mod_base = OTHER; note = 2-fluoro-modified nucleoside
  modified_base 8: mod_base = OTHER; note = 2-fluoro-modified nucleoside
  modified_base 9: mod_base = OTHER; note = 2-fluoro-modified nucleoside
  modified_base 10: mod_base = OTHER; note = 2-fluoro-modified nucleoside
  modified_base 11: mod_base = OTHER; note = 2-fluoro-modified nucleoside
  modified_base 19^20: mod_base = OTHER; note = phosphorothioate linkage
  modified_base 20^21: mod_base = OTHER; note = phosphorothioate linkage
  modified_base 1: mod_base = OTHER; note = 2-O-methyl modified nucleoside
  modified_base 2: mod_base = OTHER; note = 2-O-methyl modified nucleoside
  modified_base 3: mod_base = OTHER; note = 2-O-methyl modified nucleoside
  modified_base 12: mod_base = OTHER; note = 2-O-methyl modified nucleoside
  modified_base 14: mod_base = OTHER; note = 2-O-methyl modified nucleoside
  modified_base 17: mod_base = OTHER; note = 2-O-methyl modified nucleoside
cggcacagagaaatgcttatt

SEQ ID NO: 4360 - RNA, 21 nt, synthetic construct
  source 1..21: mol_type = other RNA
  modified_base 5: mod_base = OTHER; note = 2-fluoro-modified nucleoside
  modified_base 9: mod_base = OTHER; note = 2-fluoro-modified nucleoside
  modified_base 11: mod_base = OTHER; note = 2-fluoro-modified nucleoside
  modified_base 19^20: mod_base = OTHER; note = phosphorothioate linkage
  modified_base 20^21: mod_base = OTHER; note = phosphorothioate linkage
  modified_base 1: mod_base = OTHER; note = 2-O-methyl modified nucleoside
  modified_base 2: mod_base = OTHER; note = 2-O-methyl modified nucleoside
  modified_base 3: mod_base = OTHER; note = 2-O-methyl modified nucleoside
  modified_base 12: mod_base = OTHER; note = 2-O-methyl modified nucleoside
  modified_base 13: mod_base = OTHER; note = 2-O-methyl modified nucleoside
  modified_base 14: mod_base = OTHER; note = 2-O-methyl modified nucleoside
cggcacagagaaatgcttatt

SEQ ID NO: 4361 - RNA, 21 nt, synthetic construct
  source 1..21: mol_type = other RNA
  modified_base 5: mod_base = OTHER; note = 2-fluoro-modified nucleoside
  modified_base 9: mod_base = OTHER; note = 2-fluoro-modified nucleoside
  modified_base 11: mod_base = OTHER; note = 2-fluoro-modified nucleoside
  modified_base 19^20: mod_base = OTHER; note = phosphorothioate linkage
  modified_base 20^21: mod_base = OTHER; note = phosphorothioate linkage
  modified_base 10: mod_base = OTHER; note = 2-O-methyl modified nucleoside
  modified_base 1: mod_base = OTHER; note = 2-O-methyl modified nucleoside
  modified_base 2: mod_base = OTHER; note = 2-O-methyl modified nucleoside
  modified_base 4: mod_base = OTHER; note = 2-O-methyl modified nucleoside
  modified_base 12: mod_base = OTHER; note = 2-O-methyl modified nucleoside
  modified_base 14: mod_base = OTHER; note = 2-O-methyl modified nucleoside
  modified_base 17: mod_base = OTHER; note = 2-O-methyl modified nucleoside
cggcacagagaaatgcttatt

SEQ ID NO: 4362 - RNA, 21 nt, synthetic construct
  source 1..21: mol_type = other RNA
  modified_base 5: mod_base = OTHER; note = 2-fluoro-modified nucleoside
  modified_base 9: mod_base = OTHER; note = 2-fluoro-modified nucleoside
  modified_base 10: mod_base = OTHER; note = 2-fluoro-modified nucleoside
  modified_base 19^20: mod_base = OTHER; note = phosphorothioate linkage
  modified_base 20^21: mod_base = OTHER; note = phosphorothioate linkage
  modified_base 1: mod_base = OTHER; note = 2-O-methyl modified nucleoside
  modified_base 2: mod_base = OTHER; note = 2-O-methyl modified nucleoside
  modified_base 4: mod_base = OTHER; note = 2-O-methyl modified nucleoside
  modified_base 15: mod_base = OTHER; note = 2-O-methyl modified nucleoside
  modified_base 17: mod_base = OTHER; note = 2-O-methyl modified nucleoside
cggcacagagaaatgcttatt

SEQ ID NO: 4363 - RNA, 21 nt, synthetic construct
  source 1..21: mol_type = other RNA
  modified_base 5: mod_base = OTHER; note = 2-fluoro-modified nucleoside
  modified_base 8: mod_base = OTHER; note = 2-fluoro-modified nucleoside
  modified_base 9: mod_base = OTHER; note = 2-fluoro-modified nucleoside
  modified_base 19^20: mod_base = OTHER; note = phosphorothioate linkage
  modified_base 20^21: mod_base = OTHER; note = phosphorothioate linkage
  modified_base 1: mod_base = OTHER; note = 2-O-methyl modified nucleoside
  modified_base 2: mod_base = OTHER; note = 2-O-methyl modified nucleoside
  modified_base 4: mod_base = OTHER; note = 2-O-methyl modified nucleoside
  modified_base 7: mod_base = OTHER; note = 2-O-methyl modified nucleoside
  modified_base 11: mod_base = OTHER; note = 2-O-methyl modified nucleoside
  modified_base 13: mod_base = OTHER; note = 2-O-methyl modified nucleoside
  modified_base 16: mod_base = OTHER; note = 2-O-methyl modified nucleoside
  modified_base 19: mod_base = OTHER; note = 2-O-methyl modified nucleoside
cggcacagagaaatgcttatt

SEQ ID NO: 4364 - RNA, 21 nt, synthetic construct
  source 1..21: mol_type = other RNA
  modified_base 5: mod_base = OTHER; note = 2-fluoro-modified nucleoside
  modified_base 8: mod_base = OTHER; note = 2-fluoro-modified nucleoside
  modified_base 9: mod_base = OTHER; note = 2-fluoro-modified nucleoside
  modified_base 11: mod_base = OTHER; note = 2-fluoro-modified nucleoside
  modified_base 19^20: mod_base = OTHER; note = phosphorothioate linkage
  modified_base 20^21: mod_base = OTHER; note = phosphorothioate linkage
  modified_base 1: mod_base = OTHER; note = 2-O-methyl modified nucleoside
  modified_base 2: mod_base = OTHER; note = 2-O-methyl modified nucleoside
  modified_base 4: mod_base = OTHER; note = 2-O-methyl modified nucleoside
  modified_base 19: mod_base = OTHER; note = 2-O-methyl modified nucleoside
cggcacagagaaatgcttatt

SEQ ID NO: 4365 - RNA, 21 nt, synthetic construct
  source 1..21: mol_type = other RNA
  modified_base 5: mod_base = OTHER; note = 2-fluoro-modified nucleoside
  modified_base 8: mod_base = OTHER; note = 2-fluoro-modified nucleoside
  modified_base 9: mod_base = OTHER; note = 2-fluoro-modified nucleoside
  modified_base 11: mod_base = OTHER; note = 2-fluoro-modified nucleoside
  modified_base 19^20: mod_base = OTHER; note = phosphorothioate linkage
  modified_base 20^21: mod_base = OTHER; note = phosphorothioate linkage
  modified_base 1: mod_base = OTHER; note = 2-O-methyl modified nucleoside
  modified_base 2: mod_base = OTHER; note = 2-O-methyl modified nucleoside
  modified_base 3: mod_base = OTHER; note = 2-O-methyl modified nucleoside
  modified_base 7: mod_base = OTHER; note = 2-O-methyl modified nucleoside
  modified_base 12: mod_base = OTHER; note = 2-O-methyl modified nucleoside
  modified_base 14: mod_base = OTHER; note = 2-O-methyl modified nucleoside
  modified_base 15: mod_base = OTHER; note = 2-O-methyl modified nucleoside
cggcacagagaaatgcttatt

SEQ ID NO: 4366 - RNA, 21 nt, synthetic construct
  source 1..21: mol_type = other RNA
  modified_base 5: mod_base = OTHER; note = 2-fluoro-modified nucleoside
  modified_base 7: mod_base = OTHER; note = 2-fluoro-modified nucleoside
  modified_base 9: mod_base = OTHER; note = 2-fluoro-modified nucleoside
  modified_base 19^20: mod_base = OTHER; note = phosphorothioate linkage
  modified_base 20^21: mod_base = OTHER; note = phosphorothioate linkage
  modified_base 2: mod_base = OTHER; note = 2-O-methyl modified nucleoside
  modified_base 1: mod_base = OTHER; note = 2-O-methyl modified nucleoside
  modified_base 10: mod_base = OTHER; note = 2-O-methyl modified nucleoside
  modified_base 8: mod_base = OTHER; note = 2-O-methyl modified nucleoside
  modified_base 17: mod_base = OTHER; note = 2-O-methyl modified nucleoside
  modified_base 15: mod_base = OTHER; note = 2-O-methyl modified nucleoside
cggcacagagaaatgcttatt

SEQ ID NO: 4367 - RNA, 21 nt, synthetic construct
  source 1..21: mol_type = other RNA
  modified_base 5: mod_base = OTHER; note = 2-fluoro-modified nucleoside
  modified_base 7: mod_base = OTHER; note = 2-fluoro-modified nucleoside
  modified_base 9: mod_base = OTHER; note = 2-fluoro-modified nucleoside
  modified_base 11: mod_base = OTHER; note = 2-fluoro-modified nucleoside
  modified_base 19^20: mod_base = OTHER; note = phosphorothioate linkage
  modified_base 20^21: mod_base = OTHER; note = phosphorothioate linkage
  modified_base 1: mod_base = OTHER; note = 2-O-methyl modified nucleoside
  modified_base 2: mod_base = OTHER; note = 2-O-methyl modified nucleoside
  modified_base 15: mod_base = OTHER; note = 2-O-methyl modified nucleoside
  modified_base 13: mod_base = OTHER; note = 2-O-methyl modified nucleoside
cggcacagagaaatgcttatt

SEQ ID NO: 4368 - RNA, 21 nt, synthetic construct
  source 1..21: mol_type = other RNA
  modified_base 5: mod_base = OTHER; note = 2-fluoro-modified nucleoside
  modified_base 7: mod_base = OTHER; note = 2-fluoro-modified nucleoside
  modified_base 9: mod_base = OTHER; note = 2-fluoro-modified nucleoside
  modified_base 10: mod_base = OTHER; note = 2-fluoro-modified nucleoside
  modified_base 19^20: mod_base = OTHER; note = phosphorothioate linkage
  modified_base 20^21: mod_base = OTHER; note = phosphorothioate linkage
  modified_base 1: mod_base = OTHER; note = 2-O-methyl modified nucleoside
  modified_base 4: mod_base = OTHER; note = 2-O-methyl modified nucleoside
  modified_base 8: mod_base = OTHER; note = 2-O-methyl modified nucleoside
  modified_base 12: mod_base = OTHER; note = 2-O-methyl modified nucleoside
  modified_base 18: mod_base = OTHER; note = 2-O-methyl modified nucleoside
  modified_base 21: mod_base = OTHER; note = 2-O-methyl modified nucleoside
cggcacagagaaatgcttatt

SEQ ID NO: 4369 - RNA, 21 nt, synthetic construct
  source 1..21: mol_type = other RNA
  modified_base 5: mod_base = OTHER; note = 2-fluoro-modified nucleoside
  modified_base 7: mod_base = OTHER; note = 2-fluoro-modified nucleoside
  modified_base 8: mod_base = OTHER; note = 2-fluoro-modified nucleoside
  modified_base 9: mod_base = OTHER; note = 2-fluoro-modified nucleoside
  modified_base 10: mod_base = OTHER; note = 2-fluoro-modified nucleoside
  modified_base 19^20: mod_base = OTHER; note = phosphorothioate linkage
  modified_base 20^21: mod_base = OTHER; note = phosphorothioate linkage
  modified_base 1: mod_base = OTHER; note = 2-O-methyl modified nucleoside
  modified_base 2: mod_base = OTHER; note = 2-O-methyl modified nucleoside
  modified_base 3: mod_base = OTHER; note = 2-O-methyl modified nucleoside
  modified_base 12: mod_base = OTHER; note = 2-O-methyl modified nucleoside
  modified_base 14: mod_base = OTHER; note = 2-O-methyl modified nucleoside
cggcacagagaaatgcttatt

SEQ ID NO: 4370 - RNA, 21 nt, synthetic construct
  source 1..21: mol_type = other RNA
  modified_base 8: mod_base = OTHER; note = 2-fluoro-modified nucleoside
  modified_base 9: mod_base = OTHER; note = 2-fluoro-modified nucleoside
  modified_base 11: mod_base = OTHER; note = 2-fluoro-modified nucleoside
  modified_base 19^20: mod_base = OTHER; note = phosphorothioate linkage
  modified_base 20^21: mod_base = OTHER; note = phosphorothioate linkage
  modified_base 7: mod_base = OTHER; note = 2-O-methyl modified nucleoside
  modified_base 6: mod_base = OTHER; note = 2-O-methyl modified nucleoside
  modified_base 5: mod_base = OTHER; note = 2-O-methyl modified nucleoside
  modified_base 2: mod_base = OTHER; note = 2-O-methyl modified nucleoside
  modified_base 1: mod_base = OTHER; note = 2-O-methyl modified nucleoside
  modified_base 15: mod_base = OTHER; note = 2-O-methyl modified nucleoside
  modified_base 14: mod_base = OTHER; note = 2-O-methyl modified nucleoside
  modified_base 17: mod_base = OTHER; note = 2-O-methyl modified nucleoside
ggcacagagaaatgctttatt

SEQ ID NO: 4371 - RNA, 21 nt, synthetic construct
  source 1..21: mol_type = other RNA
  modified_base 8: mod_base = OTHER; note = 2-fluoro-modified nucleoside
  modified_base 9: mod_base = OTHER; note = 2-fluoro-modified nucleoside
  modified_base 10: mod_base = OTHER; note = 2-fluoro-modified nucleoside
  modified_base 11: mod_base = OTHER; note = 2-fluoro-modified nucleoside
  modified_base 19^20: mod_base = OTHER; note = phosphorothioate linkage
  modified_base 20^21: mod_base = OTHER; note = phosphorothioate linkage
  modified_base 1: mod_base = OTHER; note = 2-O-methyl modified nucleoside
  modified_base 12: mod_base = OTHER; note = 2-O-methyl modified nucleoside
  modified_base 13: mod_base = OTHER; note = 2-O-methyl modified nucleoside
  modified_base 15: mod_base = OTHER; note = 2-O-methyl modified nucleoside
  modified_base 16: mod_base = OTHER; note = 2-O-methyl modified nucleoside
ggcacagagaaatgctttatt

SEQ ID NO: 4372 - RNA, 21 nt, synthetic construct
  source 1..21: mol_type = other RNA
  modified_base 7: mod_base = OTHER; note = 2-fluoro-modified nucleoside
  modified_base 9: mod_base = OTHER; note = 2-fluoro-modified nucleoside
  modified_base 11: mod_base = OTHER; note = 2-fluoro-modified nucleoside
  modified_base 19^20: mod_base = OTHER; note = phosphorothioate linkage
  modified_base 20^21: mod_base = OTHER; note = phosphorothioate linkage
  modified_base 8: mod_base = OTHER; note = 2-O-methyl modified nucleoside
  modified_base 6: mod_base = OTHER; note = 2-O-methyl modified nucleoside
  modified_base 1: mod_base = OTHER; note = 2-O-methyl modified nucleoside
  modified_base 2: mod_base = OTHER; note = 2-O-methyl modified nucleoside
  modified_base 15: mod_base = OTHER; note = 2-O-methyl modified nucleoside
  modified_base 17: mod_base = OTHER; note = 2-O-methyl modified nucleoside
  modified_base 20: mod_base = OTHER; note = 2-O-methyl modified nucleoside
  modified_base 12: mod_base = OTHER; note = 2-O-methyl modified nucleoside
ggcacagagaaatgctttatt

SEQ ID NO: 4373 - RNA, 21 nt, synthetic construct
  source 1..21: mol_type = other RNA
  modified_base 7: mod_base = OTHER; note = 2-fluoro-modified nucleoside
  modified_base 9: mod_base = OTHER; note = 2-fluoro-modified nucleoside
  modified_base 10: mod_base = OTHER; note = 2-fluoro-modified nucleoside
  modified_base 19^20: mod_base = OTHER; note = phosphorothioate linkage
  modified_base 20^21: mod_base = OTHER; note = phosphorothioate linkage
  modified_base 6: mod_base = OTHER; note = 2-O-methyl modified nucleoside
  modified_base 8: mod_base = OTHER; note = 2-O-methyl modified nucleoside
  modified_base 1: mod_base = OTHER; note = 2-O-methyl modified nucleoside
  modified_base 2: mod_base = OTHER; note = 2-O-methyl modified nucleoside
  modified_base 3: mod_base = OTHER; note = 2-O-methyl modified nucleoside
  modified_base 16: mod_base = OTHER; note = 2-O-methyl modified nucleoside
  modified_base 18: mod_base = OTHER; note = 2-O-methyl modified nucleoside
ggcacagagaaatgctttatt

SEQ ID NO: 4374 - RNA, 21 nt, synthetic construct
  source 1..21: mol_type = other RNA
  modified_base 7: mod_base = OTHER; note = 2-fluoro-modified nucleoside
  modified_base 8: mod_base = OTHER; note = 2-fluoro-modified nucleoside
  modified_base 9: mod_base = OTHER; note = 2-fluoro-modified nucleoside
  modified_base 10: mod_base = OTHER; note = 2-fluoro-modified nucleoside
  modified_base 19^20: mod_base = OTHER; note = phosphorothioate linkage
  modified_base 20^21: mod_base = OTHER; note = phosphorothioate linkage
  modified_base 6: mod_base = OTHER; note = 2-O-methyl modified nucleoside
  modified_base 20: mod_base = OTHER; note = 2-O-methyl modified nucleoside
  modified_base 21: mod_base = OTHER; note = 2-O-methyl modified nucleoside
  modified_base 11: mod_base = OTHER; note = 2-O-methyl modified nucleoside
  modified_base 1: mod_base = OTHER; note = 2-O-methyl modified nucleoside
ggcacagagaaatgctttatt

SEQ ID NO: 4375 - RNA, 21 nt, synthetic construct
  source 1..21: mol_type = other RNA
  modified_base 7: mod_base = OTHER; note = 2-fluoro-modified nucleoside
  modified_base 8: mod_base = OTHER; note = 2-fluoro-modified nucleoside
  modified_base 9: mod_base = OTHER; note = 2-fluoro-modified nucleoside
  modified_base 10: mod_base = OTHER; note = 2-fluoro-modified nucleoside
  modified_base 11: mod_base = OTHER; note = 2-fluoro-modified nucleoside
  modified_base 19^20: mod_base = OTHER; note = phosphorothioate linkage
  modified_base 20^21: mod_base = OTHER; note = phosphorothioate linkage
  modified_base 1: mod_base = OTHER; note = 2-O-methyl modified nucleoside
  modified_base 2: mod_base = OTHER; note = 2-O-methyl modified nucleoside
  modified_base 3: mod_base = OTHER; note = 2-O-methyl modified nucleoside
  modified_base 15: mod_base = OTHER; note = 2-O-methyl modified nucleoside
  modified_base 14: mod_base = OTHER; note = 2-O-methyl modified nucleoside
ggcacagagaaatgctttatt

SEQ ID NO: 4376 - RNA, 21 nt, synthetic construct
  source 1..21: mol_type = other RNA
  modified_base 6: mod_base = OTHER; note = 2-fluoro-modified nucleoside
  modified_base 9: mod_base = OTHER; note = 2-fluoro-modified nucleoside
  modified_base 11: mod_base = OTHER; note = 2-fluoro-modified nucleoside
  modified_base 19^20: mod_base = OTHER; note = phosphorothioate linkage
  modified_base 20^21: mod_base = OTHER; note = phosphorothioate linkage
  modified_base 1: mod_base = OTHER; note = 2-O-methyl modified nucleoside
  modified_base 2: mod_base = OTHER; note = 2-O-methyl modified nucleoside
  modified_base 3: mod_base = OTHER; note = 2-O-methyl modified nucleoside
  modified_base 4: mod_base = OTHER; note = 2-O-methyl modified nucleoside
  modified_base 7: mod_base = OTHER; note = 2-O-methyl modified nucleoside
  modified_base 12: mod_base = OTHER; note = 2-O-methyl modified nucleoside
  modified_base 16: mod_base = OTHER; note = 2-O-methyl modified nucleoside
ggcacagagaaatgctttatt

SEQ ID NO: 4377 - RNA, 21 nt, synthetic construct
  source 1..21: mol_type = other RNA
  modified_base 19^20: mod_base = OTHER; note = phosphorothioate linkage
  modified_base 20^21: mod_base = OTHER; note = phosphorothioate linkage
  modified_base 6: mod_base = OTHER; note = 2-fluoro-modified nucleoside
  modified_base 8: mod_base = OTHER; note = 2-fluoro-modified nucleoside
  modified_base 9: mod_base = OTHER; note = 2-fluoro-modified nucleoside
  modified_base 5: mod_base = OTHER; note = 2-O-methyl modified nucleoside
  modified_base 4: mod_base = OTHER; note = 2-O-methyl modified nucleoside
  modified_base 1: mod_base = OTHER; note = 2-O-methyl modified nucleoside
  modified_base 2: mod_base = OTHER; note = 2-O-methyl modified nucleoside
  modified_base 3: mod_base = OTHER; note = 2-O-methyl modified nucleoside
  modified_base 10: mod_base = OTHER; note = 2-O-methyl modified nucleoside
  modified_base 13: mod_base = OTHER; note = 2-O-methyl modified nucleoside
  modified_base 16: mod_base = OTHER; note = 2-O-methyl modified nucleoside
  modified_base 17: mod_base = OTHER; note = 2-O-methyl modified nucleoside
ggcacagagaaatgctttatt

SEQ ID NO: 4378 - RNA, 21 nt, synthetic construct
  source 1..21: mol_type = other RNA
  modified_base 6: mod_base = OTHER; note = 2-fluoro-modified nucleoside
  modified_base 9: mod_base = OTHER; note = 2-fluoro-modified nucleoside
  modified_base 8: mod_base = OTHER; note = 2-fluoro-modified nucleoside
  modified_base 19^20: mod_base = OTHER; note = phosphorothioate linkage
  modified_base 20^21: mod_base = OTHER; note = phosphorothioate linkage
  modified_base 7: mod_base = OTHER; note = 2-O-methyl modified nucleoside
  modified_base 6: mod_base = OTHER; note = 2-O-methyl modified nucleoside
  modified_base 5: mod_base = OTHER; note = 2-O-methyl modified nucleoside
  modified_base 4: mod_base = OTHER; note = 2-O-methyl modified nucleoside
  modified_base 2: mod_base = OTHER; note = 2-O-methyl modified nucleoside
  modified_base 1: mod_base = OTHER; note = 2-O-methyl modified nucleoside
  modified_base 12: mod_base = OTHER; note = 2-O-methyl modified nucleoside
  modified_base 15: mod_base = OTHER; note = 2-O-methyl modified nucleoside
ggcacagagaaatgctttatt

SEQ ID NO: 4379 - RNA, 21 nt, synthetic construct
  source 1..21: mol_type = other RNA
  modified_base 6: mod_base = OTHER; note = 2-fluoro-modified nucleoside
  modified_base 8: mod_base = OTHER; note = 2-fluoro-modified nucleoside
  modified_base 9: mod_base = OTHER; note = 2-fluoro-modified nucleoside
  modified_base 11: mod_base = OTHER; note = 2-fluoro-modified nucleoside
  modified_base 19^20: mod_base = OTHER; note = phosphorothioate linkage
  modified_base 20^21: mod_base = OTHER; note = phosphorothioate linkage
  modified_base 1: mod_base = OTHER; note = 2-O-methyl modified nucleoside
  modified_base 2: mod_base = OTHER; note = 2-O-methyl modified nucleoside
  modified_base 3: mod_base = OTHER; note = 2-O-methyl modified nucleoside
  modified_base 10: mod_base = OTHER; note = 2-O-methyl modified nucleoside
  modified_base 12: mod_base = OTHER; note = 2-O-methyl modified nucleoside
ggcacagagaaatgctttatt

SEQ ID NO: 4380 - RNA, 21 nt, synthetic construct
  source 1..21: mol_type = other RNA
  modified_base 6: mod_base = OTHER; note = 2-fluoro-modified nucleoside
  modified_base 8: mod_base = OTHER; note = 2-fluoro-modified nucleoside
  modified_base 9: mod_base = OTHER; note = 2-fluoro-modified nucleoside
  modified_base 10: mod_base = OTHER; note = 2-fluoro-modified nucleoside
  modified_base 11: mod_base = OTHER; note = 2-fluoro-modified nucleoside
  modified_base 19^20: mod_base = OTHER; note = phosphorothioate linkage
  modified_base 20^21: mod_base = OTHER; note = phosphorothioate linkage
  modified_base 1: mod_base = OTHER; note = 2-O-methyl modified nucleoside
  modified_base 2: mod_base = OTHER; note = 2-O-methyl modified nucleoside
  modified_base 3: mod_base = OTHER; note = 2-O-methyl modified nucleoside
  modified_base 14: mod_base = OTHER; note = 2-O-methyl modified nucleoside
  modified_base 13: mod_base = OTHER; note = 2-O-methyl modified nucleoside
  modified_base 17: mod_base = OTHER; note = 2-O-methyl modified nucleoside
ggcacagagaaatgctttatt

SEQ ID NO: 4381 - RNA, 21 nt, synthetic construct
  source 1..21: mol_type = other RNA
  modified_base 6: mod_base = OTHER; note = 2-fluoro-modified nucleoside
  modified_base 7: mod_base = OTHER; note = 2-fluoro-modified nucleoside
  modified_base 9: mod_base = OTHER; note = 2-fluoro-modified nucleoside
  modified_base 19^20: mod_base = OTHER; note = phosphorothioate linkage
  modified_base 20^21: mod_base = OTHER; note = phosphorothioate linkage
  modified_base 8: mod_base = OTHER; note = 2-O-methyl modified nucleoside
  modified_base 1: mod_base = OTHER; note = 2-O-methyl modified nucleoside
  modified_base 2: mod_base = OTHER; note = 2-O-methyl modified nucleoside
  modified_base 3: mod_base = OTHER; note = 2-O-methyl modified nucleoside
  modified_base 5: mod_base = OTHER; note = 2-O-methyl modified nucleoside
  modified_base 12: mod_base = OTHER; note = 2-O-methyl modified nucleoside
  modified_base 20: mod_base = OTHER; note = 2-O-methyl modified nucleoside
ggcacagagaaatgctttatt

SEQ ID NO: 4382 - RNA, 21 nt, synthetic construct
  source 1..21: mol_type = other RNA
  modified_base 6: mod_base = OTHER; note = 2-fluoro-modified nucleoside
  modified_base 7: mod_base = OTHER; note = 2-fluoro-modified nucleoside
  modified_base 9: mod_base = OTHER; note = 2-fluoro-modified nucleoside
  modified_base 11: mod_base = OTHER; note = 2-fluoro-modified nucleoside
  modified_base 19^20: mod_base = OTHER; note = phosphorothioate linkage
  modified_base 20^21: mod_base = OTHER; note = phosphorothioate linkage
  modified_base 1: mod_base = OTHER; note = 2-O-methyl modified nucleoside
  modified_base 2: mod_base = OTHER; note = 2-O-methyl modified nucleoside
  modified_base 3: mod_base = OTHER; note = 2-O-methyl modified nucleoside
  modified_base 5: mod_base = OTHER; note = 2-O-methyl modified nucleoside
  modified_base 8: mod_base = OTHER; note = 2-O-methyl modified nucleoside
  modified_base 12: mod_base = OTHER; note = 2-O-methyl modified nucleoside
  modified_base 17: mod_base = OTHER; note = 2-O-methyl modified nucleoside
ggcacagagaaatgctttatt

SEQ ID NO: 4383 - RNA, 21 nt, synthetic construct
  source 1..21: mol_type = other RNA
  modified_base 6: mod_base = OTHER; note = 2-fluoro-modified nucleoside
  modified_base 7: mod_base = OTHER; note = 2-fluoro-modified nucleoside
  modified_base 9: mod_base = OTHER; note = 2-fluoro-modified nucleoside
  modified_base 10: mod_base = OTHER; note = 2-fluoro-modified nucleoside
  modified_base 19^20: mod_base = OTHER; note = phosphorothioate linkage
  modified_base 20^21: mod_base = OTHER; note = phosphorothioate linkage
  modified_base 1: mod_base = OTHER; note = 2-O-methyl modified nucleoside
  modified_base 2: mod_base = OTHER; note = 2-O-methyl modified nucleoside
  modified_base 3: mod_base = OTHER; note = 2-O-methyl modified nucleoside
  modified_base 4: mod_base = OTHER; note = 2-O-methyl modified nucleoside
  modified_base 11: mod_base = OTHER; note = 2-O-methyl modified nucleoside
  modified_base 12: mod_base = OTHER; note = 2-O-methyl modified nucleoside
ggcacagagaaatgctttatt

SEQ ID NO: 4384 - RNA, 21 nt, synthetic construct
  source 1..21: mol_type = other RNA
  modified_base 6: mod_base = OTHER; note = 2-fluoro-modified nucleoside
  modified_base 7: mod_base = OTHER; note = 2-fluoro-modified nucleoside
  modified_base 8: mod_base = OTHER; note = 2-fluoro-modified nucleoside
  modified_base 9: mod_base = OTHER; note = 2-fluoro-modified nucleoside
  modified_base 19^20: mod_base = OTHER; note = phosphorothioate linkage
  modified_base 20^21: mod_base = OTHER; note = phosphorothioate linkage
  modified_base 1: mod_base = OTHER; note = 2-O-methyl modified nucleoside
  modified_base 2: mod_base = OTHER; note = 2-O-methyl modified nucleoside
  modified_base 3: mod_base = OTHER; note = 2-O-methyl modified nucleoside
  modified_base 4: mod_base = OTHER; note = 2-O-methyl modified nucleoside
  modified_base 12: mod_base = OTHER; note = 2-O-methyl modified nucleoside
  modified_base 14: mod_base = OTHER; note = 2-O-methyl modified nucleoside
  modified_base 17: mod_base = OTHER; note = 2-O-methyl modified nucleoside
ggcacagagaaatgctttatt

SEQ ID NO: 4385 - RNA, 21 nt, synthetic construct
  source 1..21: mol_type = other RNA
  modified_base 6: mod_base = OTHER; note = 2-fluoro-modified nucleoside
  modified_base 7: mod_base = OTHER; note = 2-fluoro-modified nucleoside
  modified_base 8: mod_base = OTHER; note = 2-fluoro-modified nucleoside
  modified_base 9: mod_base = OTHER; note = 2-fluoro-modified nucleoside
  modified_base 11: mod_base = OTHER; note = 2-fluoro-modified nucleoside
  modified_base 19^20: mod_base = OTHER; note = phosphorothioate linkage
  modified_base 20^21: mod_base = OTHER; note = phosphorothioate linkage
  modified_base 1: mod_base = OTHER; note = 2-O-methyl modified nucleoside
  modified_base 2: mod_base = OTHER; note = 2-O-methyl modified nucleoside
  modified_base 3: mod_base = OTHER; note = 2-O-methyl modified nucleoside
  modified_base 14: mod_base = OTHER; note = 2-O-methyl modified nucleoside
ggcacagagaaatgctttatt

SEQ ID NO: 4386 - RNA, 21 nt, synthetic construct
  source 1..21: mol_type = other RNA
  modified_base 6: mod_base = OTHER; note = 2-fluoro-modified nucleoside
  modified_base 7: mod_base = OTHER; note = 2-fluoro-modified nucleoside
  modified_base 8: mod_base = OTHER; note = 2-fluoro-modified nucleoside
  modified_base 9: mod_base = OTHER; note = 2-fluoro-modified nucleoside
  modified_base 10: mod_base = OTHER; note = 2-fluoro-modified nucleoside
  modified_base 19^20: mod_base = OTHER; note = phosphorothioate linkage
  modified_base 20^21: mod_base = OTHER; note = phosphorothioate linkage
  modified_base 5: mod_base = OTHER; note = 2-O-methyl modified nucleoside
  modified_base 1: mod_base = OTHER; note = 2-O-methyl modified nucleoside
  modified_base 2: mod_base = OTHER; note = 2-O-methyl modified nucleoside
  modified_base 4: mod_base = OTHER; note = 2-O-methyl modified nucleoside
  modified_base 16: mod_base = OTHER; note = 2-O-methyl modified nucleoside
ggcacagagaaatgctttatt

SEQ ID NO: 4387 - RNA, 21 nt, synthetic construct
  source 1..21: mol_type = other RNA
  modified_base 8: mod_base = OTHER; note = 2-fluoro-modified nucleoside
  modified_base 9: mod_base = OTHER; note = 2-fluoro-modified nucleoside
  modified_base 11: mod_base = OTHER; note = 2-fluoro-modified nucleoside
  modified_base 19^20: mod_base = OTHER; note = phosphorothioate linkage
  modified_base 20^21: mod_base = OTHER; note = phosphorothioate linkage
  modified_base 7: mod_base = OTHER; note = 2-O-methyl modified nucleoside
  modified_base 6: mod_base = OTHER; note = 2-O-methyl modified nucleoside
  modified_base 5: mod_base = OTHER; note = 2-O-methyl modified nucleoside
  modified_base 1: mod_base = OTHER; note = 2-O-methyl modified nucleoside
  modified_base 15: mod_base = OTHER; note = 2-O-methyl modified nucleoside
  modified_base 17: mod_base = OTHER; note = 2-O-methyl modified nucleoside
  modified_base 21: mod_base = OTHER; note = 2-O-methyl modified nucleoside
gcacagagaaatgctttgatt

SEQ ID NO: 4388 - RNA, 21 nt, synthetic construct
  source 1..21: mol_type = other RNA
  modified_base 8: mod_base = OTHER; note = 2-fluoro-modified nucleoside
  modified_base 9: mod_base = OTHER; note = 2-fluoro-modified nucleoside
  modified_base 10: mod_base = OTHER; note = 2-fluoro-modified nucleoside
  modified_base 11: mod_base = OTHER; note = 2-fluoro-modified nucleoside
  modified_base 19^20: mod_base = OTHER; note = phosphorothioate linkage
  modified_base 20^21: mod_base = OTHER; note = phosphorothioate linkage
gcacagagaaatgctttgatt

SEQ ID NO: 4389 - RNA, 21 nt, synthetic construct
  source 1..21: mol_type = other RNA
  modified_base 7: mod_base = OTHER; note = 2-fluoro-modified nucleoside
  modified_base 9: mod_base = OTHER; note = 2-fluoro-modified nucleoside
  modified_base 11: mod_base = OTHER; note = 2-fluoro-modified nucleoside
  modified_base 19^20: mod_base = OTHER; note = phosphorothioate linkage
  modified_base 20^21: mod_base = OTHER; note = phosphorothioate linkage
  modified_base 8: mod_base = OTHER; note = 2-O-methyl modified nucleoside
  modified_base 1: mod_base = OTHER; note = 2-O-methyl modified nucleoside
  modified_base 2: mod_base = OTHER; note = 2-O-methyl modified nucleoside
  modified_base 5: mod_base = OTHER; note = 2-O-methyl modified nucleoside
  modified_base 19: mod_base = OTHER; note = 2-O-methyl modified nucleoside
gcacagagaaatgctttgatt

SEQ ID NO: 4390 - RNA, 21 nt, synthetic construct
  source 1..21: mol_type = other RNA
  modified_base 7: mod_base = OTHER; note = 2-fluoro-modified nucleoside
  modified_base 9: mod_base = OTHER; note = 2-fluoro-modified nucleoside
  modified_base 10: mod_base = OTHER; note = 2-fluoro-modified nucleoside
  modified_base 19^20: mod_base = OTHER; note = phosphorothioate linkage
  modified_base 20^21: mod_base = OTHER; note = phosphorothioate linkage
  modified_base 1: mod_base = OTHER; note = 2-O-methyl modified nucleoside
  modified_base 2: mod_base = OTHER; note = 2-O-methyl modified nucleoside
  modified_base 3: mod_base = OTHER; note = 2-O-methyl modified nucleoside
  modified_base 4: mod_base = OTHER; note = 2-O-methyl modified nucleoside
  modified_base 12: mod_base = OTHER; note = 2-O-methyl modified nucleoside
  modified_base 17: mod_base = OTHER; note = 2-O-methyl modified nucleoside
  modified_base 21: mod_base = OTHER; note = 2-O-methyl modified nucleoside
gcacagagaaatgctttgatt

SEQ ID NO: 4391 - RNA, 21 nt, synthetic construct
  source 1..21: mol_type = other RNA
  modified_base 7: mod_base = OTHER; note = 2-fluoro-modified nucleoside
  modified_base 8: mod_base = OTHER; note = 2-fluoro-modified nucleoside
  modified_base 9: mod_base = OTHER; note = 2-fluoro-modified nucleoside
  modified_base 10: mod_base = OTHER; note = 2-fluoro-modified nucleoside
  modified_base 19^20: mod_base = OTHER; note = phosphorothioate linkage
  modified_base 20^21: mod_base = OTHER; note = phosphorothioate linkage
  modified_base 1: mod_base = OTHER; note = 2-O-methyl modified nucleoside
  modified_base 2: mod_base = OTHER; note = 2-O-methyl modified nucleoside
  modified_base 3: mod_base = OTHER; note = 2-O-methyl modified nucleoside
  modified_base 15: mod_base = OTHER; note = 2-O-methyl modified nucleoside
  modified_base 16: mod_base = OTHER; note = 2-O-methyl modified nucleoside
  modified_base 19: mod_base = OTHER; note = 2-O-methyl modified nucleoside
gcacagagaaatgctttgatt

SEQ ID NO: 4392 - RNA, 21 nt, synthetic construct
  source 1..21: mol_type = other RNA
  modified_base 7: mod_base = OTHER; note = 2-fluoro-modified nucleoside
  modified_base 8: mod_base = OTHER; note = 2-fluoro-modified nucleoside
  modified_base 9: mod_base = OTHER; note = 2-fluoro-modified nucleoside
  modified_base 10: mod_base = OTHER; note = 2-fluoro-modified nucleoside
  modified_base 19^20: mod_base = OTHER; note = phosphorothioate linkage
  modified_base 20^21: mod_base = OTHER; note = phosphorothioate linkage
  modified_base 1: mod_base = OTHER; note = 2-O-methyl modified nucleoside
  modified_base 2: mod_base = OTHER; note = 2-O-methyl modified nucleoside
  modified_base 3: mod_base = OTHER; note = 2-O-methyl modified nucleoside
  modified_base 20: mod_base = OTHER; note = 2-O-methyl modified nucleoside
gcacagagaaatgctttgatt

SEQ ID NO: 4393 - RNA, 21 nt, synthetic construct
  source 1..21: mol_type = other RNA
  modified_base 6: mod_base = OTHER; note = 2-fluoro-modified nucleoside
  modified_base 9: mod_base = OTHER; note = 2-fluoro-modified nucleoside
  modified_base 11: mod_base = OTHER; note = 2-fluoro-modified nucleoside
  modified_base 19^20: mod_base = OTHER; note = phosphorothioate linkage
  modified_base 20^21: mod_base = OTHER; note = phosphorothioate linkage
gcacagagaaatgctttgatt

SEQ ID NO: 4394 - RNA, 21 nt, synthetic construct
  source 1..21: mol_type = other RNA
  modified_base 6: mod_base = OTHER; note = 2-fluoro-modified nucleoside
  modified_base 9: mod_base = OTHER; note = 2-fluoro-modified nucleoside
  modified_base 10: mod_base = OTHER; note = 2-fluoro-modified nucleoside
  modified_base 19^20: mod_base = OTHER; note = phosphorothioate linkage
  modified_base 20^21: mod_base = OTHER; note = phosphorothioate linkage
gcacagagaaatgctttgatt

SEQ ID NO: 4395 - RNA, 21 nt, synthetic construct
  source 1..21: mol_type = other RNA
  modified_base 6: mod_base = OTHER; note = 2-fluoro-modified nucleoside
  modified_base 8: mod_base = OTHER; note = 2-fluoro-modified nucleoside
  modified_base 9: mod_base = OTHER; note = 2-fluoro-modified nucleoside
  modified_base 19^20: mod_base = OTHER; note = phosphorothioate linkage
  modified_base 20^21: mod_base = OTHER; note = phosphorothioate linkage
gcacagagaaatgctttgatt

SEQ ID NO: 4396 - RNA, 21 nt, synthetic construct
  source 1..21: mol_type = other RNA
  modified_base 6: mod_base = OTHER; note = 2-fluoro-modified nucleoside
  modified_base 8: mod_base = OTHER; note = 2-fluoro-modified nucleoside
  modified_base 9: mod_base = OTHER; note = 2-fluoro-modified nucleoside
  modified_base 11: mod_base = OTHER; note = 2-fluoro-modified nucleoside
  modified_base 19^20: mod_base = OTHER; note = phosphorothioate linkage
  modified_base 20^21: mod_base = OTHER; note = phosphorothioate linkage
  modified_base 1: mod_base = OTHER; note = 2-O-methyl modified nucleoside
  modified_base 12: mod_base = OTHER; note = 2-O-methyl modified nucleoside
  modified_base 2: mod_base = OTHER; note = 2-O-methyl modified nucleoside
  modified_base 15: mod_base = OTHER; note = 2-O-methyl modified nucleoside
  modified_base 20: mod_base = OTHER; note = 2-O-methyl modified nucleoside
  modified_base 21: mod_base = OTHER; note = 2-O-methyl modified nucleoside
gcacagagaaatgctttgatt

SEQ ID NO: 4397 - RNA, 21 nt, synthetic construct
  source 1..21: mol_type = other RNA
  modified_base 6: mod_base = OTHER; note = 2-fluoro-modified nucleoside
  modified_base 8: mod_base = OTHER; note = 2-fluoro-modified nucleoside
  modified_base 9: mod_base = OTHER; note = 2-fluoro-modified nucleoside
  modified_base 10: mod_base = OTHER; note = 2-fluoro-modified nucleoside
  modified_base 11: mod_base = OTHER; note = 2-fluoro-modified nucleoside
  modified_base 19^20: mod_base = OTHER; note = phosphorothioate linkage
  modified_base 20^21: mod_base = OTHER; note = phosphorothioate linkage
  modified_base 1: mod_base = OTHER; note = 2-O-methyl modified nucleoside
  modified_base 2: mod_base = OTHER; note = 2-O-methyl modified nucleoside
  modified_base 3: mod_base = OTHER; note = 2-O-methyl modified nucleoside
  modified_base 16: mod_base = OTHER; note = 2-O-methyl modified nucleoside
  modified_base 15: mod_base = OTHER; note = 2-O-methyl modified nucleoside
gcacagagaaatgctttgatt

SEQ ID NO: 4398 - RNA, 21 nt, synthetic construct
  source 1..21: mol_type = other RNA
  modified_base 6: mod_base = OTHER; note = 2-fluoro-modified nucleoside
  modified_base 7: mod_base = OTHER; note = 2-fluoro-modified nucleoside
  modified_base 9: mod_base = OTHER; note = 2-fluoro-modified nucleoside
  modified_base 19^20: mod_base = OTHER; note = phosphorothioate linkage
  modified_base 20^21: mod_base = OTHER; note = phosphorothioate linkage
  modified_base 1: mod_base = OTHER; note = 2-O-methyl modified nucleoside
  modified_base 2: mod_base = OTHER; note = 2-O-methyl modified nucleoside
  modified_base 14: mod_base = OTHER; note = 2-O-methyl modified nucleoside
  modified_base 13: mod_base = OTHER; note = 2-O-methyl modified nucleoside
  modified_base 19: mod_base = OTHER; note = 2-O-methyl modified nucleoside
  modified_base 21: mod_base = OTHER; note = 2-O-methyl modified nucleoside
  modified_base 15: mod_base = OTHER; note = 2-O-methyl modified nucleoside
gcacagagaaatgctttgatt

SEQ ID NO: 4399 - RNA, 21 nt, synthetic construct
  source 1..21: mol_type = other RNA
  modified_base 6: mod_base = OTHER; note = 2-fluoro-modified nucleoside
  modified_base 7: mod_base = OTHER; note = 2-fluoro-modified nucleoside
  modified_base 9: mod_base = OTHER; note = 2-fluoro-modified nucleoside
  modified_base 11: mod_base = OTHER; note = 2-fluoro-modified nucleoside
  modified_base 19^20: mod_base = OTHER; note = phosphorothioate linkage
  modified_base 20^21: mod_base = OTHER; note = phosphorothioate linkage
  modified_base 1: mod_base = OTHER; note = 2-O-methyl modified nucleoside
  modified_base 2: mod_base = OTHER; note = 2-O-methyl modified nucleoside
  modified_base 3: mod_base = OTHER; note = 2-O-methyl modified nucleoside
  modified_base 10: mod_base = OTHER; note = 2-O-methyl modified nucleoside
  modified_base 12: mod_base = OTHER; note = 2-O-methyl modified nucleoside
gcacagagaaatgctttgatt

SEQ ID NO: 4400 - RNA, 21 nt, synthetic construct
  source 1..21: mol_type = other RNA
  modified_base 6: mod_base = OTHER; note = 2-fluoro-modified nucleoside
  modified_base 7: mod_base = OTHER; note = 2-fluoro-modified nucleoside
  modified_base 9: mod_base = OTHER; note = 2-fluoro-modified nucleoside
  modified_base 10: mod_base = OTHER; note = 2-fluoro-modified nucleoside
  modified_base 19^20: mod_base = OTHER; note = phosphorothioate linkage
  modified_base 20^21: mod_base = OTHER; note = phosphorothioate linkage
  modified_base 12: mod_base = OTHER; note = 2-O-methyl modified nucleoside
  modified_base 1: mod_base = OTHER; note = 2-O-methyl modified nucleoside
  modified_base 2: mod_base = OTHER; note = 2-O-methyl modified nucleoside
  modified_base 16: mod_base = OTHER; note = 2-O-methyl modified nucleoside
  modified_base 17: mod_base = OTHER; note = 2-O-methyl modified nucleoside
  modified_base 19: mod_base = OTHER; note = 2-O-methyl modified nucleoside
gcacagagaaatgctttgatt

SEQ ID NO: 4401 - RNA, 21 nt, synthetic construct
  source 1..21: mol_type = other RNA
  modified_base 6: mod_base = OTHER; note = phosphorothioate linkage
  modified_base 7: mod_base = OTHER; note = phosphorothioate linkage
  modified_base 8: mod_base = OTHER; note = phosphorothioate linkage
  modified_base 9: mod_base = OTHER; note = phosphorothioate linkage
  modified_base 19^20: mod_base = OTHER; note = phosphorothioate linkage
  modified_base 20^21: mod_base = OTHER; note = phosphorothioate linkage
  modified_base 1: mod_base = OTHER; note = 2-O-methyl modified nucleoside
  modified_base 2: mod_base = OTHER; note = 2-O-methyl modified nucleoside
  modified_base 3: mod_base = OTHER; note = 2-O-methyl modified nucleoside
  modified_base 4: mod_base = OTHER; note = 2-O-methyl modified nucleoside
  modified_base 11: mod_base = OTHER; note = 2-O-methyl modified nucleoside
  modified_base 10: mod_base = OTHER; note = 2-O-methyl modified nucleoside
gcacagagaaatgctttgatt

SEQ ID NO: 4402 - RNA, 21 nt, synthetic construct
  source 1..21: mol_type = other RNA
  modified_base 6: mod_base = OTHER; note = phosphorothioate linkage
  modified_base 7: mod_base = OTHER; note = phosphorothioate linkage
  modified_base 8: mod_base = OTHER; note = phosphorothioate linkage
  modified_base 9: mod_base = OTHER; note = phosphorothioate linkage
  modified_base 11: mod_base = OTHER; note = phosphorothioate linkage
  modified_base 19^20: mod_base = OTHER; note = phosphorothioate linkage
  modified_base 20^21: mod_base = OTHER; note = phosphorothioate linkage
  modified_base 1: mod_base = OTHER; note = 2-O-methyl modified nucleoside
  modified_base 2: mod_base = OTHER; note = 2-O-methyl modified nucleoside
  modified_base 3: mod_base = OTHER; note = 2-O-methyl modified nucleoside
  modified_base 12: mod_base = OTHER; note = 2-O-methyl modified nucleoside
  modified_base 18: mod_base = OTHER; note = 2-O-methyl modified nucleoside
gcacagagaaatgctttgatt

SEQ ID NO: 4403 - RNA, 21 nt, synthetic construct
  source 1..21: mol_type = other RNA
  modified_base 6: mod_base = OTHER; note = phosphorothioate linkage
  modified_base 7: mod_base = OTHER; note = phosphorothioate linkage
  modified_base 8: mod_base = OTHER; note = phosphorothioate linkage
  modified_base 9: mod_base = OTHER; note = phosphorothioate linkage
  modified_base 10: mod_base = OTHER; note = phosphorothioate linkage
  modified_base 19^20: mod_base = OTHER; note = phosphorothioate linkage
  modified_base 20^21: mod_base = OTHER; note = phosphorothioate linkage
  modified_base 1: mod_base = OTHER; note = 2-O-methyl modified nucleoside
  modified_base 2: mod_base = OTHER; note = 2-O-methyl modified nucleoside
  modified_base 3: mod_base = OTHER; note = 2-O-methyl modified nucleoside
  modified_base 15: mod_base = OTHER; note = 2-O-methyl modified nucleoside
  modified_base 13: mod_base = OTHER; note = 2-O-methyl modified nucleoside
gcacagagaaatgctttgatt

SEQ ID NO: 4404 - RNA, 21 nt, synthetic construct
  source 1..21: mol_type = other RNA
  modified_base 5: mod_base = OTHER; note = phosphorothioate linkage
  modified_base 9: mod_base = OTHER; note = phosphorothioate linkage
  modified_base 11: mod_base = OTHER; note = phosphorothioate linkage
  modified_base 19^20: mod_base = OTHER; note = phosphorothioate linkage
  modified_base 20^21: mod_base = OTHER; note = phosphorothioate linkage
  modified_base 1: mod_base = OTHER; note = 2-O-methyl modified nucleoside
  modified_base 3: mod_base = OTHER; note = 2-O-methyl modified nucleoside
  modified_base 10: mod_base = OTHER; note = 2-O-methyl modified nucleoside
  modified_base 12: mod_base = OTHER; note = 2-O-methyl modified nucleoside
  modified_base 14: mod_base = OTHER; note = 2-O-methyl modified nucleoside
  modified_base 13: mod_base = OTHER; note = 2-O-methyl modified nucleoside
gcacagagaaatgctttgatt

SEQ ID NO: 4405 - RNA, 21 nt, synthetic construct
  source 1..21: mol_type = other RNA
  modified_base 5: mod_base = OTHER; note = phosphorothioate linkage
  modified_base 9: mod_base = OTHER; note = phosphorothioate linkage
  modified_base 10: mod_base = OTHER; note = phosphorothioate linkage
  modified_base 19^20: mod_base = OTHER; note = phosphorothioate linkage
  modified_base 20^21: mod_base = OTHER; note = phosphorothioate linkage
  modified_base 1: mod_base = OTHER; note = 2-O-methyl modified nucleoside
  modified_base 2: mod_base = OTHER; note = 2-O-methyl modified nucleoside
  modified_base 3: mod_base = OTHER; note = 2-O-methyl modified nucleoside
  modified_base 4: mod_base = OTHER; note = 2-O-methyl modified nucleoside
  modified_base 14: mod_base = OTHER; note = 2-O-methyl modified nucleoside
  modified_base 16: mod_base = OTHER; note = 2-O-methyl modified nucleoside
  modified_base 17: mod_base = OTHER; note = 2-O-methyl modified nucleoside
gcacagagaaatgctttgatt

SEQ ID NO: 4406 - RNA, 21 nt, synthetic construct
  source 1..21: mol_type = other RNA
  modified_base 5: mod_base = OTHER; note = phosphorothioate linkage
  modified_base 8: mod_base = OTHER; note = phosphorothioate linkage
  modified_base 9: mod_base = OTHER; note = phosphorothioate linkage
  modified_base 19^20: mod_base = OTHER; note = phosphorothioate linkage
  modified_base 20^21: mod_base = OTHER; note = phosphorothioate linkage
  modified_base 1: mod_base = OTHER; note = 2-O-methyl modified nucleoside
  modified_base 2: mod_base = OTHER; note = 2-O-methyl modified nucleoside
  modified_base 3: mod_base = OTHER; note = 2-O-methyl modified nucleoside
  modified_base 4: mod_base = OTHER; note = 2-O-methyl modified nucleoside
  modified_base 19: mod_base = OTHER; note = 2-O-methyl modified nucleoside
  modified_base 21: mod_base = OTHER; note = 2-O-methyl modified nucleoside
gcacagagaaatgctttgatt

SEQ ID NO: 4407 - RNA, 21 nt, synthetic construct
  source 1..21: mol_type = other RNA
  modified_base 5: mod_base = OTHER; note = phosphorothioate linkage
  modified_base 8: mod_base = OTHER; note = phosphorothioate linkage
  modified_base 9: mod_base = OTHER; note = phosphorothioate linkage
  modified_base 11: mod_base = OTHER; note = phosphorothioate linkage
  modified_base 19^20: mod_base = OTHER; note = phosphorothioate linkage
  modified_base 20^21: mod_base = OTHER; note = phosphorothioate linkage
  modified_base 1: mod_base = OTHER; note = 2-O-methyl modified nucleoside
  modified_base 2: mod_base = OTHER; note = 2-O-methyl modified nucleoside
  modified_base 15: mod_base = OTHER; note = 2-O-methyl modified nucleoside
  modified_base 12: mod_base = OTHER; note = 2-O-methyl modified nucleoside
  modified_base 19: mod_base = OTHER; note = 2-O-methyl modified nucleoside
  modified_base 21: mod_base = OTHER; note = 2-O-methyl modified nucleoside
gcacagagaaatgctttgatt

SEQ ID NO: 4408 - RNA, 21 nt, synthetic construct
  source 1..21: mol_type = other RNA
  modified_base 5: mod_base = OTHER; note = phosphorothioate linkage
  modified_base 8: mod_base = OTHER; note = phosphorothioate linkage
  modified_base 9: mod_base = OTHER; note = phosphorothioate linkage
  modified_base 10: mod_base = OTHER; note = phosphorothioate linkage
  modified_base 11: mod_base = OTHER; note = phosphorothioate linkage
  modified_base 19^20: mod_base = OTHER; note = phosphorothioate linkage
  modified_base 20^21: mod_base = OTHER; note = phosphorothioate linkage
  modified_base 1: mod_base = OTHER; note = 2-O-methyl modified nucleoside
  modified_base 2: mod_base = OTHER; note = 2-O-methyl modified nucleoside
gcacagagaaatgctttgatt

SEQ ID NO: 4409 - RNA, 21 nt, synthetic construct
  source 1..21: mol_type = other RNA
  modified_base 5: mod_base = OTHER; note = phosphorothioate linkage
  modified_base 7: mod_base = OTHER; note = phosphorothioate linkage
  modified_base 9: mod_base = OTHER; note = phosphorothioate linkage
  modified_base 19^20: mod_base = OTHER; note = phosphorothioate linkage
  modified_base 20^21: mod_base = OTHER; note = phosphorothioate linkage
gcacagagaaatgctttgatt

SEQ ID NO: 4410 - RNA, 21 nt, synthetic construct
  source 1..21: mol_type = other RNA
  modified_base 5: mod_base = OTHER; note = phosphorothioate linkage
  modified_base 7: mod_base = OTHER; note = phosphorothioate linkage
  modified_base 9: mod_base = OTHER; note = phosphorothioate linkage
  modified_base 11: mod_base = OTHER; note = phosphorothioate linkage
  modified_base 19^20: mod_base = OTHER; note = phosphorothioate linkage
  modified_base 20^21: mod_base = OTHER; note = phosphorothioate linkage
  modified_base 1: mod_base = OTHER; note = 2-O-methyl modified nucleoside
  modified_base 2: mod_base = OTHER; note = 2-O-methyl modified nucleoside
  modified_base 3: mod_base = OTHER; note = 2-O-methyl modified nucleoside
  modified_base 4: mod_base = OTHER; note = 2-O-methyl modified nucleoside
  modified_base 20: mod_base = OTHER; note = 2-O-methyl modified nucleoside
  modified_base 13: mod_base = OTHER; note = 2-O-methyl modified nucleoside
gcacagagaaatgctttgatt

SEQ ID NO: 4411 - RNA, 21 nt, synthetic construct
  source 1..21: mol_type = other RNA
  modified_base 5: mod_base = OTHER; note = phosphorothioate linkage
  modified_base 7: mod_base = OTHER; note = phosphorothioate linkage
  modified_base 9: mod_base = OTHER; note = phosphorothioate linkage
  modified_base 10: mod_base = OTHER; note = phosphorothioate linkage
  modified_base 19^20: mod_base = OTHER; note = phosphorothioate linkage
  modified_base 20^21: mod_base = OTHER; note = phosphorothioate linkage
gcacagagaaatgctttgatt

SEQ ID NO: 4412 - RNA, 21 nt, synthetic construct
  source 1..21: mol_type = other RNA
  modified_base 5: mod_base = OTHER; note = phosphorothioate linkage
  modified_base 7: mod_base = OTHER; note = phosphorothioate linkage
  modified_base 8: mod_base = OTHER; note = phosphorothioate linkage
  modified_base 9: mod_base = OTHER; note = phosphorothioate linkage
  modified_base 10: mod_base = OTHER; note = phosphorothioate linkage
  modified_base 19^20: mod_base = OTHER; note = phosphorothioate linkage
  modified_base 20^21: mod_base = OTHER; note = phosphorothioate linkage
gcacagagaaatgctttgatt

SEQ ID NO: 4413 - RNA, 21 nt, synthetic construct
  source 1..21: mol_type = other RNA
  modified_base 5: mod_base = OTHER; note = phosphorothioate linkage
  modified_base 6: mod_base = OTHER; note = phosphorothioate linkage
  modified_base 9: mod_base = OTHER; note = phosphorothioate linkage
  modified_base 19^20: mod_base = OTHER; note = phosphorothioate linkage
  modified_base 20^21: mod_base = OTHER; note = phosphorothioate linkage
  modified_base 1: mod_base = OTHER; note = 2-O-methyl modified nucleoside
  modified_base 2: mod_base = OTHER; note = 2-O-methyl modified nucleoside
  modified_base 3: mod_base = OTHER; note = 2-O-methyl modified nucleoside
  modified_base 12: mod_base = OTHER; note = 2-O-methyl modified nucleoside
  modified_base 14: mod_base = OTHER; note = 2-O-methyl modified nucleoside
  modified_base 17: mod_base = OTHER; note = 2-O-methyl modified nucleoside
gcacagagaaatgctttgatt

SEQ ID NO: 4414 - RNA, 21 nt, synthetic construct
  source 1..21: mol_type = other RNA
  modified_base 5: mod_base = OTHER; note = phosphorothioate linkage
  modified_base 6: mod_base = OTHER; note = phosphorothioate linkage
  modified_base 9: mod_base = OTHER; note = phosphorothioate linkage
  modified_base 11: mod_base = OTHER; note = phosphorothioate linkage
  modified_base 19^20: mod_base = OTHER; note = phosphorothioate linkage
  modified_base 20^21: mod_base = OTHER; note = phosphorothioate linkage
gcacagagaaatgctttgatt

SEQ ID NO: 4415 - RNA, 21 nt, synthetic construct
  source 1..21: mol_type = other RNA
  modified_base 5: mod_base = OTHER; note = phosphorothioate linkage
  modified_base 6: mod_base = OTHER; note = phosphorothioate linkage
  modified_base 9: mod_base = OTHER; note = phosphorothioate linkage
  modified_base 10: mod_base = OTHER; note = phosphorothioate linkage
  modified_base 19^20: mod_base = OTHER; note = phosphorothioate linkage
  modified_base 20^21: mod_base = OTHER; note = phosphorothioate linkage
gcacagagaaatgctttgatt

SEQ ID NO: 4416 - RNA, 21 nt, synthetic construct
  source 1..21: mol_type = other RNA
  modified_base 5: mod_base = OTHER; note = phosphorothioate linkage
  modified_base 6: mod_base = OTHER; note = phosphorothioate linkage
  modified_base 8: mod_base = OTHER; note = phosphorothioate linkage
  modified_base 9: mod_base = OTHER; note = phosphorothioate linkage
  modified_base 19^20: mod_base = OTHER; note = phosphorothioate linkage
  modified_base 20^21: mod_base = OTHER; note = phosphorothioate linkage
  modified_base 1: mod_base = OTHER; note = 2-O-methyl modified nucleoside
  modified_base 2: mod_base = OTHER; note = 2-O-methyl modified nucleoside
  modified_base 12: mod_base = OTHER; note = 2-O-methyl modified nucleoside
  modified_base 14: mod_base = OTHER; note = 2-O-methyl modified nucleoside
  modified_base 19: mod_base = OTHER; note = 2-O-methyl modified nucleoside
gcacagagaaatgctttgatt

SEQ ID NO: 4417 - RNA, 21 nt, synthetic construct
  source 1..21: mol_type = other RNA
  modified_base 5: mod_base = OTHER; note = phosphorothioate linkage
  modified_base 6: mod_base = OTHER; note = phosphorothioate linkage
  modified_base 8: mod_base = OTHER; note = phosphorothioate linkage
  modified_base 9: mod_base = OTHER; note = phosphorothioate linkage
  modified_base 11: mod_base = OTHER; note = phosphorothioate linkage
  modified_base 19^20: mod_base = OTHER; note = phosphorothioate linkage
  modified_base 20^21: mod_base = OTHER; note = phosphorothioate linkage
  modified_base 1: mod_base = OTHER; note = 2-O-methyl modified nucleoside
  modified_base 15: mod_base = OTHER; note = 2-O-methyl modified nucleoside
  modified_base 12: mod_base = OTHER; note = 2-O-methyl modified nucleoside
  modified_base 20: mod_base = OTHER; note = 2-O-methyl modified nucleoside
gcacagagaaatgctttgatt

SEQ ID NO: 4418 - RNA, 21 nt, synthetic construct
  source 1..21: mol_type = other RNA
  modified_base 5: mod_base = OTHER; note = phosphorothioate linkage
  modified_base 6: mod_base = OTHER; note = phosphorothioate linkage
  modified_base 7: mod_base = OTHER; note = phosphorothioate linkage
  modified_base 8: mod_base = OTHER; note = phosphorothioate linkage
  modified_base 9: mod_base = OTHER; note = phosphorothioate linkage
  modified_base 19^20: mod_base = OTHER; note = phosphorothioate linkage
  modified_base 20^21: mod_base = OTHER; note = phosphorothioate linkage
gcacagagaaatgctttgatt

SEQ ID NO: 4419 - RNA, 21 nt, synthetic construct
  source 1..21: mol_type = other RNA
  modified_base 7: mod_base = OTHER; note = phosphorothioate linkage
  modified_base 9: mod_base = OTHER; note = phosphorothioate linkage
  modified_base 10: mod_base = OTHER; note = phosphorothioate linkage
  modified_base 19^20: mod_base = OTHER; note = phosphorothioate linkage
  modified_base 20^21: mod_base = OTHER; note = phosphorothioate linkage
  modified_base 1: mod_base = OTHER; note = 2-O-methyl modified nucleoside
  modified_base 2: mod_base = OTHER; note = 2-O-methyl modified nucleoside
  modified_base 3: mod_base = OTHER; note = 2-O-methyl modified nucleoside
  modified_base 16: mod_base = OTHER; note = 2-O-methyl modified nucleoside
  modified_base 12: mod_base = OTHER; note = 2-O-methyl modified nucleoside
cacagagaaatgctttgaatt

SEQ ID NO: 4420 - RNA, 21 nt, synthetic construct
  source 1..21: mol_type = other RNA
  modified_base 7: mod_base = OTHER; note = phosphorothioate linkage
  modified_base 8: mod_base = OTHER; note = phosphorothioate linkage
  modified_base 9: mod_base = OTHER; note = phosphorothioate linkage
  modified_base 10: mod_base = OTHER; note = phosphorothioate linkage
  modified_base 19^20: mod_base = OTHER; note = phosphorothioate linkage
  modified_base 20^21: mod_base = OTHER; note = phosphorothioate linkage
  modified_base 1: mod_base = OTHER; note = 2-O-methyl modified nucleoside
  modified_base 2: mod_base = OTHER; note = 2-O-methyl modified nucleoside
  modified_base 19: mod_base = OTHER; note = 2-O-methyl modified nucleoside
  modified_base 16: mod_base = OTHER; note = 2-O-methyl modified nucleoside
  modified_base 13: mod_base = OTHER; note = 2-O-methyl modified nucleoside
cacagagaaatgctttgaatt

SEQ ID NO: 4421 - RNA, 21 nt, synthetic construct
  source 1..21: mol_type = other RNA
  modified_base 9: mod_base = OTHER; note = 2-fluoro-modified nucleoside
  modified_base 10: mod_base = OTHER; note = 2-fluoro-modified nucleoside
  modified_base 6: mod_base = OTHER; note = 2-fluoro-modified nucleoside
  modified_base 19^20: mod_base = OTHER; note = phosphorothioate linkage
  modified_base 20^21: mod_base = OTHER; note = phosphorothioate linkage
  modified_base 19^20: mod_base = OTHER; note = phosphorothioate linkage
  modified_base 20^21: mod_base = OTHER; note = phosphorothioate linkage
  modified_base 1: mod_base = OTHER; note = 2-O-methyl modified nucleoside
  modified_base 2: mod_base = OTHER; note = 2-O-methyl modified nucleoside
  modified_base 4: mod_base = OTHER; note = 2-O-methyl modified nucleoside
cacagagaaatgctttgaatt

SEQ ID NO: 4422 - RNA, 21 nt, synthetic construct
  source 1..21: mol_type = other RNA
  modified_base 6: mod_base = OTHER; note = 2-fluoro-modified nucleoside
  modified_base 8: mod_base = OTHER; note = 2-fluoro-modified nucleoside
  modified_base 9: mod_base = OTHER; note = 2-fluoro-modified nucleoside
  modified_base 19^20: mod_base = OTHER; note = phosphorothioate linkage
  modified_base 20^21: mod_base = OTHER; note = phosphorothioate linkage
  modified_base 1: mod_base = OTHER; note = 2-O-methyl modified nucleoside
  modified_base 2: mod_base = OTHER; note = 2-O-methyl modified nucleoside
  modified_base 4: mod_base = OTHER; note = 2-O-methyl modified nucleoside
  modified_base 16: mod_base = OTHER; note = 2-O-methyl modified nucleoside
  modified_base 18: mod_base = OTHER; note = 2-O-methyl modified nucleoside
cacagagaaatgctttgaatt

SEQ ID NO: 4423 - RNA, 21 nt, synthetic construct
  source 1..21: mol_type = other RNA
  modified_base 6: mod_base = OTHER; note = 2-fluoro-modified nucleoside
  modified_base 7: mod_base = OTHER; note = 2-fluoro-modified nucleoside
  modified_base 9: mod_base = OTHER; note = 2-fluoro-modified nucleoside
  modified_base 19^20: mod_base = OTHER; note = phosphorothioate linkage
  modified_base 20^21: mod_base = OTHER; note = phosphorothioate linkage
  modified_base 1: mod_base = OTHER; note = 2-O-methyl modified nucleoside
  modified_base 2: mod_base = OTHER; note = 2-O-methyl modified nucleoside
  modified_base 5: mod_base = OTHER; note = 2-O-methyl modified nucleoside
  modified_base 17: mod_base = OTHER; note = 2-O-methyl modified nucleoside
  modified_base 21: mod_base = OTHER; note = 2-O-methyl modified nucleoside
  modified_base 18: mod_base = OTHER; note = 2-O-methyl modified nucleoside
cacagagaaatgctttgaatt

SEQ ID NO: 4424 - RNA, 21 nt, synthetic construct
  source 1..21: mol_type = other RNA
  modified_base 6: mod_base = OTHER; note = 2-fluoro-modified nucleoside
  modified_base 7: mod_base = OTHER; note = 2-fluoro-modified nucleoside
  modified_base 9: mod_base = OTHER; note = 2-fluoro-modified nucleoside
  modified_base 10: mod_base = OTHER; note = 2-fluoro-modified nucleoside
  modified_base 19^20: mod_base = OTHER; note = phosphorothioate linkage
  modified_base 20^21: mod_base = OTHER; note = phosphorothioate linkage
cacagagaaatgctttgaatt

SEQ ID NO: 4425 - RNA, 21 nt, synthetic construct
  source 1..21: mol_type = other RNA
  modified_base 6: mod_base = OTHER; note = 2-fluoro-modified nucleoside
  modified_base 7: mod_base = OTHER; note = 2-fluoro-modified nucleoside
  modified_base 8: mod_base = OTHER; note = 2-fluoro-modified nucleoside
  modified_base 9: mod_base = OTHER; note = 2-fluoro-modified nucleoside
  modified_base 19^20: mod_base = OTHER; note = phosphorothioate linkage
  modified_base 20^21: mod_base = OTHER; note = phosphorothioate linkage
  modified_base 19: mod_base = OTHER; note = 2-O-methyl modified nucleoside
  modified_base 15: mod_base = OTHER; note = 2-O-methyl modified nucleoside
  modified_base 13: mod_base = OTHER; note = 2-O-methyl modified nucleoside
  modified_base 4: mod_base = OTHER; note = 2-O-methyl modified nucleoside
  modified_base 1: mod_base = OTHER; note = 2-O-methyl modified nucleoside
  modified_base 2: mod_base = OTHER; note = 2-O-methyl modified nucleoside
cacagagaaatgctttgaatt

SEQ ID NO: 4426 - RNA, 21 nt, synthetic construct
  source 1..21: mol_type = other RNA
  modified_base 6: mod_base = OTHER; note = 2-fluoro-modified nucleoside
  modified_base 7: mod_base = OTHER; note = 2-fluoro-modified nucleoside
  modified_base 8: mod_base = OTHER; note = 2-fluoro-modified nucleoside
  modified_base 9: mod_base = OTHER; note = 2-fluoro-modified nucleoside
  modified_base 10: mod_base = OTHER; note = 2-fluoro-modified nucleoside
  modified_base 19^20: mod_base = OTHER; note = phosphorothioate linkage
  modified_base 20^21: mod_base = OTHER; note = phosphorothioate linkage
cacagagaaatgctttgaatt

SEQ ID NO: 4427 - RNA, 21 nt, synthetic construct
  source 1..21: mol_type = other RNA
  modified_base 5: mod_base = OTHER; note = 2-fluoro-modified nucleoside
  modified_base 9: mod_base = OTHER; note = 2-fluoro-modified nucleoside
  modified_base 10: mod_base = OTHER; note = 2-fluoro-modified nucleoside
  modified_base 19^20: mod_base = OTHER; note = phosphorothioate linkage
  modified_base 20^21: mod_base = OTHER; note = phosphorothioate linkage
  modified_base 1: mod_base = OTHER; note = 2-O-methyl modified nucleoside
  modified_base 2: mod_base = OTHER; note = 2-O-methyl modified nucleoside
  modified_base 4: mod_base = OTHER; note = 2-O-methyl modified nucleoside
  modified_base 12: mod_base = OTHER; note = 2-O-methyl modified nucleoside
  modified_base 14: mod_base = OTHER; note = 2-O-methyl modified nucleoside
  modified_base 17: mod_base = OTHER; note = 2-O-methyl modified nucleoside
cacagagaaatgctttgaatt

SEQ ID NO: 4428 - RNA, 21 nt, synthetic construct
  source 1..21: mol_type = other RNA
  modified_base 5: mod_base = OTHER; note = 2-fluoro-modified nucleoside
  modified_base 8: mod_base = OTHER; note = 2-fluoro-modified nucleoside
  modified_base 9: mod_base = OTHER; note = 2-fluoro-modified nucleoside
  modified_base 19^20: mod_base = OTHER; note = phosphorothioate linkage
  modified_base 20^21: mod_base = OTHER; note = phosphorothioate linkage
  modified_base 11: mod_base = OTHER; note = 2-O-methyl modified nucleoside
  modified_base 1: mod_base = OTHER; note = 2-O-methyl modified nucleoside
  modified_base 2: mod_base = OTHER; note = 2-O-methyl modified nucleoside
  modified_base 16: mod_base = OTHER; note = 2-O-methyl modified nucleoside
  modified_base 20: mod_base = OTHER; note = 2-O-methyl modified nucleoside
cacagagaaatgctttgaatt

SEQ ID NO: 4429 - RNA, 21 nt, synthetic construct
  source 1..21: mol_type = other RNA
  modified_base 5: mod_base = OTHER; note = 2-fluoro-modified nucleoside
  modified_base 9: mod_base = OTHER; note = 2-fluoro-modified nucleoside
  modified_base 11: mod_base = OTHER; note = 2-fluoro-modified nucleoside
  modified_base 19^20: mod_base = OTHER; note = phosphorothioate linkage
  modified_base 20^21: mod_base = OTHER; note = phosphorothioate linkage
cacagagaaatgctttgaatt

SEQ ID NO: 4430 - RNA, 21 nt, synthetic construct
  source 1..21: mol_type = other RNA
  modified_base 5: mod_base = OTHER; note = 2-fluoro-modified nucleoside
  modified_base 7: mod_base = OTHER; note = 2-fluoro-modified nucleoside
  modified_base 9: mod_base = OTHER; note = 2-fluoro-modified nucleoside
  modified_base 10: mod_base = OTHER; note = 2-fluoro-modified nucleoside
  modified_base 19^20: mod_base = OTHER; note = phosphorothioate linkage
  modified_base 20^21: mod_base = OTHER; note = phosphorothioate linkage
cacagagaaatgctttgaatt

SEQ ID NO: 4431 - RNA, 21 nt, synthetic construct
  source 1..21: mol_type = other RNA
  modified_base 5: mod_base = OTHER; note = 2-fluoro-modified nucleoside
  modified_base 7: mod_base = OTHER; note = 2-fluoro-modified nucleoside
  modified_base 8: mod_base = OTHER; note = 2-fluoro-modified nucleoside
  modified_base 9: mod_base = OTHER; note = 2-fluoro-modified nucleoside
  modified_base 10: mod_base = OTHER; note = 2-fluoro-modified nucleoside
  modified_base 19^20: mod_base = OTHER; note = phosphorothioate linkage
  modified_base 20^21: mod_base = OTHER; note = phosphorothioate linkage
  modified_base 1: mod_base = OTHER; note = 2-O-methyl modified nucleoside
  modified_base 3: mod_base = OTHER; note = 2-O-methyl modified nucleoside
  modified_base 17: mod_base = OTHER; note = 2-O-methyl modified nucleoside
  modified_base 18: mod_base = OTHER; note = 2-O-methyl modified nucleoside
  modified_base 21: mod_base = OTHER; note = 2-O-methyl modified nucleoside
cacagagaaatgctttgaatt

SEQ ID NO: 4432 - RNA, 21 nt, synthetic construct
  source 1..21: mol_type = other RNA
  modified_base 5: mod_base = OTHER; note = 2-fluoro-modified nucleoside
  modified_base 6: mod_base = OTHER; note = 2-fluoro-modified nucleoside
  modified_base 9: mod_base = OTHER; note = 2-fluoro-modified nucleoside
  modified_base 19^20: mod_base = OTHER; note = phosphorothioate linkage
  modified_base 20^21: mod_base = OTHER; note = phosphorothioate linkage
cacagagaaatgctttgaatt

SEQ ID NO: 4433 - RNA, 21 nt, synthetic construct
  source 1..21: mol_type = other RNA
  modified_base 5: mod_base = OTHER; note = 2-fluoro-modified nucleoside
  modified_base 6: mod_base = OTHER; note = 2-fluoro-modified nucleoside
  modified_base 9: mod_base = OTHER; note = 2-fluoro-modified nucleoside
  modified_base 10: mod_base = OTHER; note = 2-fluoro-modified nucleoside
  modified_base 19^20: mod_base = OTHER; note = phosphorothioate linkage
  modified_base 20^21: mod_base = OTHER; note = phosphorothioate linkage
  modified_base 1: mod_base = OTHER; note = 2-O-methyl modified nucleoside
  modified_base 2: mod_base = OTHER; note = 2-O-methyl modified nucleoside
  modified_base 14: mod_base = OTHER; note = 2-O-methyl modified nucleoside
  modified_base 17: mod_base = OTHER; note = 2-O-methyl modified nucleoside
cacagagaaatgctttgaatt

SEQ ID NO: 4434 - RNA, 21 nt, synthetic construct
  source 1..21: mol_type = other RNA
  modified_base 5: mod_base = OTHER; note = 2-fluoro-modified nucleoside
  modified_base 6: mod_base = OTHER; note = 2-fluoro-modified nucleoside
  modified_base 8: mod_base = OTHER; note = 2-fluoro-modified nucleoside
  modified_base 9: mod_base = OTHER; note = 2-fluoro-modified nucleoside
  modified_base 19^20: mod_base = OTHER; note = phosphorothioate linkage
  modified_base 20^21: mod_base = OTHER; note = phosphorothioate linkage
cacagagaaatgctttgaatt

SEQ ID NO: 4435 - RNA, 21 nt, synthetic construct
  source 1..21: mol_type = other RNA
  modified_base 5: mod_base = OTHER; note = 2-fluoro-modified nucleoside
  modified_base 6: mod_base = OTHER; note = 2-fluoro-modified nucleoside
  modified_base 7: mod_base = OTHER; note = 2-fluoro-modified nucleoside
  modified_base 8: mod_base = OTHER; note = 2-fluoro-modified nucleoside
  modified_base 9: mod_base = OTHER; note = 2-fluoro-modified nucleoside
  modified_base 19^20: mod_base = OTHER; note = phosphorothioate linkage
  modified_base 20^21: mod_base = OTHER; note = phosphorothioate linkage
cacagagaaatgctttgaatt

SEQ ID NO: 4436 - RNA, 21 nt, synthetic construct
  source 1..21: mol_type = other RNA
  modified_base 8: mod_base = OTHER; note = 2-fluoro-modified nucleoside
  modified_base 9: mod_base = OTHER; note = 2-fluoro-modified nucleoside
  modified_base 11: mod_base = OTHER; note = 2-fluoro-modified nucleoside
  modified_base 19^20: mod_base = OTHER; note = phosphorothioate linkage
  modified_base 20^21: mod_base = OTHER; note = phosphorothioate linkage
  modified_base 7: mod_base = OTHER; note = 2-O-methyl modified nucleoside
  modified_base 5: mod_base = OTHER; note = 2-O-methyl modified nucleoside
  modified_base 4: mod_base = OTHER; note = 2-O-methyl modified nucleoside
  modified_base 1: mod_base = OTHER; note = 2-O-methyl modified nucleoside
  modified_base 15: mod_base = OTHER; note = 2-O-methyl modified nucleoside
  modified_base 18: mod_base = OTHER; note = 2-O-methyl modified nucleoside
acagagaaatgctttgatatt

SEQ ID NO: 4437 - RNA, 21 nt, synthetic construct
  source 1..21: mol_type = other RNA
  modified_base 7: mod_base = OTHER; note = 2-fluoro-modified nucleoside
  modified_base 9: mod_base = OTHER; note = 2-fluoro-modified nucleoside
  modified_base 11: mod_base = OTHER; note = 2-fluoro-modified nucleoside
  modified_base 19^20: mod_base = OTHER; note = phosphorothioate linkage
  modified_base 20^21: mod_base = OTHER; note = phosphorothioate linkage
acagagaaatgctttgatatt

SEQ ID NO: 4438 - RNA, 21 nt, synthetic construct
  source 1..21: mol_type = other RNA
  modified_base 6: mod_base = OTHER; note = 2-fluoro-modified nucleoside
  modified_base 9: mod_base = OTHER; note = 2-fluoro-modified nucleoside
  modified_base 11: mod_base = OTHER; note = 2-fluoro-modified nucleoside
  modified_base 19^20: mod_base = OTHER; note = phosphorothioate linkage
  modified_base 20^21: mod_base = OTHER; note = phosphorothioate linkage
acagagaaatgctttgatatt

SEQ ID NO: 4439 - RNA, 21 nt, synthetic construct
  source 1..21: mol_type = other RNA
  modified_base 6: mod_base = OTHER; note = 2-fluoro-modified nucleoside
  modified_base 9: mod_base = OTHER; note = 2-fluoro-modified nucleoside
  modified_base 8: mod_base = OTHER; note = 2-fluoro-modified nucleoside
  modified_base 19^20: mod_base = OTHER; note = phosphorothioate linkage
  modified_base 20^21: mod_base = OTHER; note = phosphorothioate linkage
  modified_base 1: mod_base = OTHER; note = 2-O-methyl modified nucleoside
  modified_base 2: mod_base = OTHER; note = 2-O-methyl modified nucleoside
  modified_base 4: mod_base = OTHER; note = 2-O-methyl modified nucleoside
  modified_base 12: mod_base = OTHER; note = 2-O-methyl modified nucleoside
  modified_base 16: mod_base = OTHER; note = 2-O-methyl modified nucleoside
  modified_base 21: mod_base = OTHER; note = 2-O-methyl modified nucleoside
acagagaaatgctttgatatt

SEQ ID NO: 4440 - RNA, 21 nt, synthetic construct
  source 1..21: mol_type = other RNA
  modified_base 6: mod_base = OTHER; note = 2-fluoro-modified nucleoside
  modified_base 8: mod_base = OTHER; note = 2-fluoro-modified nucleoside
  modified_base 9: mod_base = OTHER; note = 2-fluoro-modified nucleoside
  modified_base 11: mod_base = OTHER; note = 2-fluoro-modified nucleoside
  modified_base 19^20: mod_base = OTHER; note = phosphorothioate linkage
  modified_base 20^21: mod_base = OTHER; note = phosphorothioate linkage
  modified_base 1: mod_base = OTHER; note = 2-O-methyl modified nucleoside
  modified_base 2: mod_base = OTHER; note = 2-O-methyl modified nucleoside
  modified_base 3: mod_base = OTHER; note = 2-O-methyl modified nucleoside
  modified_base 12: mod_base = OTHER; note = 2-O-methyl modified nucleoside
  modified_base 15: mod_base = OTHER; note = 2-O-methyl modified nucleoside
acagagaaatgctttgatatt

SEQ ID NO: 4441 - RNA, 21 nt, synthetic construct
  source 1..21: mol_type = other RNA
  modified_base 6: mod_base = OTHER; note = 2-fluoro-modified nucleoside
  modified_base 7: mod_base = OTHER; note = 2-fluoro-modified nucleoside
  modified_base 9: mod_base = OTHER; note = 2-fluoro-modified nucleoside
  modified_base 19^20: mod_base = OTHER; note = phosphorothioate linkage
  modified_base 20^21: mod_base = OTHER; note = phosphorothioate linkage
  modified_base 1: mod_base = OTHER; note = 2-O-methyl modified nucleoside
  modified_base 3: mod_base = OTHER; note = 2-O-methyl modified nucleoside
  modified_base 12: mod_base = OTHER; note = 2-O-methyl modified nucleoside
  modified_base 14: mod_base = OTHER; note = 2-O-methyl modified nucleoside
  modified_base 17: mod_base = OTHER; note = 2-O-methyl modified nucleoside
acagagaaatgctttgatatt

SEQ ID NO: 4442 - RNA, 21 nt, synthetic construct
  source 1..21: mol_type = other RNA
  modified_base 6: mod_base = OTHER; note = 2-fluoro-modified nucleoside
  modified_base 7: mod_base = OTHER; note = 2-fluoro-modified nucleoside
  modified_base 9: mod_base = OTHER; note = 2-fluoro-modified nucleoside
  modified_base 11: mod_base = OTHER; note = 2-fluoro-modified nucleoside
  modified_base 19^20: mod_base = OTHER; note = phosphorothioate linkage
  modified_base 20^21: mod_base = OTHER; note = phosphorothioate linkage
  modified_base 1: mod_base = OTHER; note = 2-O-methyl modified nucleoside
  modified_base 3: mod_base = OTHER; note = 2-O-methyl modified nucleoside
  modified_base 5: mod_base = OTHER; note = 2-O-methyl modified nucleoside
  modified_base 13: mod_base = OTHER; note = 2-O-methyl modified nucleoside
  modified_base 14: mod_base = OTHER; note = 2-O-methyl modified nucleoside
  modified_base 18: mod_base = OTHER; note = 2-O-methyl modified nucleoside
acagagaaatgctttgatatt

SEQ ID NO: 4443 - RNA, 21 nt, synthetic construct
  source 1..21: mol_type = other RNA
  modified_base 6: mod_base = OTHER; note = 2-fluoro-modified nucleoside
  modified_base 7: mod_base = OTHER; note = 2-fluoro-modified nucleoside
  modified_base 8: mod_base = OTHER; note = 2-fluoro-modified nucleoside
  modified_base 9: mod_base = OTHER; note = 2-fluoro-modified nucleoside
  modified_base 19^20: mod_base = OTHER; note = phosphorothioate linkage
  modified_base 20^21: mod_base = OTHER; note = phosphorothioate linkage
acagagaaatgctttgatatt

SEQ ID NO: 4444 - RNA, 21 nt, synthetic construct
  source 1..21: mol_type = other RNA
  modified_base 6: mod_base = OTHER; note = 2-fluoro-modified nucleoside
  modified_base 7: mod_base = OTHER; note = 2-fluoro-modified nucleoside
  modified_base 8: mod_base = OTHER; note = 2-fluoro-modified nucleoside
  modified_base 9: mod_base = OTHER; note = 2-fluoro-modified nucleoside
  modified_base 11: mod_base = OTHER; note = 2-fluoro-modified nucleoside
  modified_base 19^20: mod_base = OTHER; note = phosphorothioate linkage
  modified_base 20^21: mod_base = OTHER; note = phosphorothioate linkage
  modified_base 18: mod_base = OTHER; note = 2-O-methyl modified nucleoside
  modified_base 20: mod_base = OTHER; note = 2-O-methyl modified nucleoside
  modified_base 15: mod_base = OTHER; note = 2-O-methyl modified nucleoside
  modified_base 1: mod_base = OTHER; note = 2-O-methyl modified nucleoside
  modified_base 2: mod_base = OTHER; note = 2-O-methyl modified nucleoside
acagagaaatgctttgatatt

SEQ ID NO: 4445 - RNA, 21 nt, synthetic construct
  source 1..21: mol_type = other RNA
  modified_base 5: mod_base = OTHER; note = 2-fluoro-modified nucleoside
  modified_base 9: mod_base = OTHER; note = 2-fluoro-modified nucleoside
  modified_base 11: mod_base = OTHER; note = 2-fluoro-modified nucleoside
  modified_base 19^20: mod_base = OTHER; note = phosphorothioate linkage
  modified_base 20^21: mod_base = OTHER; note = phosphorothioate linkage
acagagaaatgctttgatatt

SEQ ID NO: 4446 - RNA, 21 nt, synthetic construct
  source 1..21: mol_type = other RNA
  modified_base 5: mod_base = OTHER; note = 2-fluoro-modified nucleoside
  modified_base 8: mod_base = OTHER; note = 2-fluoro-modified nucleoside
  modified_base 9: mod_base = OTHER; note = 2-fluoro-modified nucleoside
  modified_base 19^20: mod_base = OTHER; note = phosphorothioate linkage
  modified_base 20^21: mod_base = OTHER; note = phosphorothioate linkage
acagagaaatgctttgatatt

SEQ ID NO: 4447 - RNA, 21 nt, synthetic construct
  source 1..21: mol_type = other RNA
  modified_base 5: mod_base = OTHER; note = 2-fluoro-modified nucleoside
  modified_base 8: mod_base = OTHER; note = 2-fluoro-modified nucleoside
  modified_base 9: mod_base = OTHER; note = 2-fluoro-modified nucleoside
  modified_base 11: mod_base = OTHER; note = 2-fluoro-modified nucleoside
  modified_base 19^20: mod_base = OTHER; note = phosphorothioate linkage
  modified_base 20^21: mod_base = OTHER; note = phosphorothioate linkage
  modified_base 1: mod_base = OTHER; note = 2-O-methyl modified nucleoside
  modified_base 2: mod_base = OTHER; note = 2-O-methyl modified nucleoside
  modified_base 3: mod_base = OTHER; note = 2-O-methyl modified nucleoside
  modified_base 15: mod_base = OTHER; note = 2-O-methyl modified nucleoside
  modified_base 20: mod_base = OTHER; note = 2-O-methyl modified nucleoside
acagagaaatgctttgatatt

SEQ ID NO: 4448 - RNA, 21 nt, synthetic construct
  source 1..21: mol_type = other RNA
  modified_base 5: mod_base = OTHER; note = 2-fluoro-modified nucleoside
  modified_base 7: mod_base = OTHER; note = 2-fluoro-modified nucleoside
  modified_base 9: mod_base = OTHER; note = 2-fluoro-modified nucleoside
  modified_base 19^20: mod_base = OTHER; note = phosphorothioate linkage
  modified_base 20^21: mod_base = OTHER; note = phosphorothioate linkage
acagagaaatgctttgatatt

SEQ ID NO: 4449 - RNA, 21 nt, synthetic construct
  source 1..21: mol_type = other RNA
  modified_base 5: mod_base = OTHER; note = 2-fluoro-modified nucleoside
  modified_base 7: mod_base = OTHER; note = 2-fluoro-modified nucleoside
  modified_base 9: mod_base = OTHER; note = 2-fluoro-modified nucleoside
  modified_base 11: mod_base = OTHER; note = 2-fluoro-modified nucleoside
  modified_base 19^20: mod_base = OTHER; note = phosphorothioate linkage
  modified_base 20^21: mod_base = OTHER; note = phosphorothioate linkage
acagagaaatgctttgatatt

SEQ ID NO: 4450 - RNA, 21 nt, synthetic construct
  source 1..21: mol_type = other RNA
  modified_base 5: mod_base = OTHER; note = 2-fluoro-modified nucleoside
  modified_base 6: mod_base = OTHER; note = 2-fluoro-modified nucleoside
  modified_base 9: mod_base = OTHER; note = 2-fluoro-modified nucleoside
  modified_base 19^20: mod_base = OTHER; note = phosphorothioate linkage
  modified_base 20^21: mod_base = OTHER; note = phosphorothioate linkage
acagagaaatgctttgatatt

SEQ ID NO: 4451 - RNA, 21 nt, synthetic construct
  source 1..21: mol_type = other RNA
  modified_base 5: mod_base = OTHER; note = 2-fluoro-modified nucleoside
  modified_base 6: mod_base = OTHER; note = 2-fluoro-modified nucleoside
  modified_base 9: mod_base = OTHER; note = 2-fluoro-modified nucleoside
  modified_base 11: mod_base = OTHER; note = 2-fluoro-modified nucleoside
  modified_base 19^20: mod_base = OTHER; note = phosphorothioate linkage
  modified_base 20^21: mod_base = OTHER; note = phosphorothioate linkage
acagagaaatgctttgatatt

SEQ ID NO: 4452 - RNA, 21 nt, synthetic construct
  source 1..21: mol_type = other RNA
  modified_base 5: mod_base = OTHER; note = 2-fluoro-modified nucleoside
  modified_base 6: mod_base = OTHER; note = 2-fluoro-modified nucleoside
  modified_base 8: mod_base = OTHER; note = 2-fluoro-modified nucleoside
  modified_base 9: mod_base = OTHER; note = 2-fluoro-modified nucleoside
  modified_base 19^20: mod_base = OTHER; note = phosphorothioate linkage
  modified_base 20^21: mod_base = OTHER; note = phosphorothioate linkage
acagagaaatgctttgatatt

SEQ ID NO: 4453 - RNA, 21 nt, synthetic construct
  source 1..21: mol_type = other RNA
  modified_base 5: mod_base = OTHER; note = 2-fluoro-modified nucleoside
  modified_base 6: mod_base = OTHER; note = 2-fluoro-modified nucleoside
  modified_base 8: mod_base = OTHER; note = 2-fluoro-modified nucleoside
  modified_base 9: mod_base = OTHER; note = 2-fluoro-modified nucleoside
  modified_base 11: mod_base = OTHER; note = 2-fluoro-modified nucleoside
  modified_base 19^20: mod_base = OTHER; note = phosphorothioate linkage
  modified_base 20^21: mod_base = OTHER; note = phosphorothioate linkage
  modified_base 1: mod_base = OTHER; note = 2-O-methyl modified nucleoside
  modified_base 2: mod_base = OTHER; note = 2-O-methyl modified nucleoside
  modified_base 3: mod_base = OTHER; note = 2-O-methyl modified nucleoside
  modified_base 19: mod_base = OTHER; note = 2-O-methyl modified nucleoside
  modified_base 21: mod_base = OTHER; note = 2-O-methyl modified nucleoside
acagagaaatgctttgatatt

SEQ ID NO: 4454 - RNA, 21 nt, synthetic construct
  source 1..21: mol_type = other RNA
  modified_base 5: mod_base = OTHER; note = 2-fluoro-modified nucleoside
  modified_base 6: mod_base = OTHER; note = 2-fluoro-modified nucleoside
  modified_base 7: mod_base = OTHER; note = 2-fluoro-modified nucleoside
  modified_base 8: mod_base = OTHER; note = 2-fluoro-modified nucleoside
  modified_base 9: mod_base = OTHER; note = 2-fluoro-modified nucleoside
  modified_base 19^20: mod_base = OTHER; note = phosphorothioate linkage
  modified_base 20^21: mod_base = OTHER; note = phosphorothioate linkage
acagagaaatgctttgatatt

SEQ ID NO: 4455 - RNA, 21 nt, synthetic construct
  source 1..21: mol_type = other RNA
  modified_base 9: mod_base = OTHER; note = 2-fluoro-modified nucleoside
  modified_base 11: mod_base = OTHER; note = 2-fluoro-modified nucleoside
  modified_base 19^20: mod_base = OTHER; note = phosphorothioate linkage
  modified_base 20^21: mod_base = OTHER; note = phosphorothioate linkage
cagagaaatgctttgatgatt

SEQ ID NO: 4456 - DNA, 21 bp, synthetic construct
  misc_feature 9: note = DNA
  misc_feature 1..8: note = RNA
  misc_feature 10..21: note = RNA
  source 1..21: mol_type = other DNA
  modified_base 1..4: mod_base = OTHER; note = 2-O-methyl modified nucleoside
  modified_base 6: mod_base = OTHER; note = 2-O-methyl modified nucleoside
  modified_base 11..21: mod_base = OTHER; note = 2-O-methyl modified nucleoside
  modified_base 5: mod_base = OTHER; note = 2-fluoro-modified nucleoside
  modified_base 7..8: mod_base = OTHER; note = 2-fluoro-modified nucleoside
  modified_base 10: mod_base = OTHER; note = 2-fluoro-modified nucleoside
  modified_base 19..21: mod_base = OTHER; note = phosphorothioate linkage
cagagaaatgctttgatgatt

SEQ ID NO: 4457 - RNA, 21 nt, synthetic construct
  source 1..21: mol_type = other RNA
  modified_base 6: mod_base = OTHER; note = 2-fluoro-modified nucleoside
  modified_base 7: mod_base = OTHER; note = 2-fluoro-modified nucleoside
  modified_base 9: mod_base = OTHER; note = 2-fluoro-modified nucleoside
  modified_base 19^20: mod_base = OTHER; note = phosphorothioate linkage
  modified_base 20^21: mod_base = OTHER; note = phosphorothioate linkage
agagaaatgctttgatgaatt

SEQ ID NO: 4458 - RNA, 21 nt, synthetic construct
  source 1..21: mol_type = other RNA
  modified_base 5: mod_base = OTHER; note = 2-fluoro-modified nucleoside
  modified_base 7: mod_base = OTHER; note = 2-fluoro-modified nucleoside
  modified_base 9: mod_base = OTHER; note = 2-fluoro-modified nucleoside
  modified_base 19^20: mod_base = OTHER; note = phosphorothioate linkage
  modified_base 20^21: mod_base = OTHER; note = phosphorothioate linkage
  modified_base 21: mod_base = OTHER; note = 2-O-methyl modified nucleoside
  modified_base 19: mod_base = OTHER; note = 2-O-methyl modified nucleoside
  modified_base 15: mod_base = OTHER; note = 2-O-methyl modified nucleoside
  modified_base 1: mod_base = OTHER; note = 2-O-methyl modified nucleoside
  modified_base 2: mod_base = OTHER; note = 2-O-methyl modified nucleoside
agagaaatgctttgatgaatt

SEQ ID NO: 4459 - RNA, 21 nt, synthetic construct
  source 1..21: mol_type = other RNA
  modified_base 5: mod_base = OTHER; note = 2-fluoro-modified nucleoside
  modified_base 6: mod_base = OTHER; note = 2-fluoro-modified nucleoside
  modified_base 9: mod_base = OTHER; note = 2-fluoro-modified nucleoside
  modified_base 19^20: mod_base = OTHER; note = phosphorothioate linkage
  modified_base 20^21: mod_base = OTHER; note = phosphorothioate linkage
  modified_base 1: mod_base = OTHER; note = 2-O-methyl modified nucleoside
  modified_base 2: mod_base = OTHER; note = 2-O-methyl modified nucleoside
  modified_base 3: mod_base = OTHER; note = 2-O-methyl modified nucleoside
  modified_base 17: mod_base = OTHER; note = 2-O-methyl modified nucleoside
  modified_base 20: mod_base = OTHER; note = 2-O-methyl modified nucleoside
agagaaatgctttgatgaatt

SEQ ID NO: 4460 - RNA, 21 nt, synthetic construct
  source 1..21: mol_type = other RNA
  modified_base 5: mod_base = OTHER; note = 2-fluoro-modified nucleoside
  modified_base 6: mod_base = OTHER; note = 2-fluoro-modified nucleoside
  modified_base 9: mod_base = OTHER; note = 2-fluoro-modified nucleoside
  modified_base 19^20: mod_base = OTHER; note = phosphorothioate linkage
  modified_base 20^21: mod_base = OTHER; note = phosphorothioate linkage
  modified_base 1: mod_base = OTHER; note = 2-O-methyl modified nucleoside
  modified_base 2: mod_base = OTHER; note = 2-O-methyl modified nucleoside
  modified_base 3: mod_base = OTHER; note = 2-O-methyl modified nucleoside
  modified_base 4: mod_base = OTHER; note = 2-O-methyl modified nucleoside
  modified_base 15: mod_base = OTHER; note = 2-O-methyl modified nucleoside
  modified_base 17: mod_base = OTHER; note = 2-O-methyl modified nucleoside
  modified_base 13: mod_base = OTHER; note = 2-O-methyl modified nucleoside
gaaatgctttgatgagacatt

SEQ ID NO: 4461 - RNA, 21 nt, synthetic construct
  source 1..21: mol_type = other RNA
  modified_base 7: mod_base = OTHER; note = 2-fluoro-modified nucleoside
  modified_base 8: mod_base = OTHER; note = 2-fluoro-modified nucleoside
  modified_base 9: mod_base = OTHER; note = 2-fluoro-modified nucleoside
  modified_base 10: mod_base = OTHER; note = 2-fluoro-modified nucleoside
  modified_base 19^20: mod_base = OTHER; note = phosphorothioate linkage
  modified_base 20^21: mod_base = OTHER; note = phosphorothioate linkage
gaaatgctttgatgagacatt

SEQ ID NO: 4462 - RNA, 21 nt, synthetic construct
  source 1..21: mol_type = other RNA
  modified_base 5: mod_base = OTHER; note = 2-fluoro-modified nucleoside
  modified_base 9: mod_base = OTHER; note = 2-fluoro-modified nucleoside
  modified_base 10: mod_base = OTHER; note = 2-fluoro-modified nucleoside
  modified_base 19^20: mod_base = OTHER; note = phosphorothioate linkage
  modified_base 20^21: mod_base = OTHER; note = phosphorothioate linkage
  modified_base 1: mod_base = OTHER; note = 2-O-methyl modified nucleoside
  modified_base 2: mod_base = OTHER; note = 2-O-methyl modified nucleoside
  modified_base 3: mod_base = OTHER; note = 2-O-methyl modified nucleoside
  modified_base 15: mod_base = OTHER; note = 2-O-methyl modified nucleoside
  modified_base 12: mod_base = OTHER; note = 2-O-methyl modified nucleoside
gaaatgctttgatgagacatt

SEQ ID NO: 4463 - RNA, 21 nt, synthetic construct
  source 1..21: mol_type = other RNA
  modified_base 5: mod_base = OTHER; note = 2-fluoro-modified nucleoside
  modified_base 8: mod_base = OTHER; note = 2-fluoro-modified nucleoside
  modified_base 9: mod_base = OTHER; note = 2-fluoro-modified nucleoside
  modified_base 19^20: mod_base = OTHER; note = phosphorothioate linkage
  modified_base 20^21: mod_base = OTHER; note = phosphorothioate linkage
  modified_base 1: mod_base = OTHER; note = 2-O-methyl modified nucleoside
  modified_base 2: mod_base = OTHER; note = 2-O-methyl modified nucleoside
  modified_base 3: mod_base = OTHER; note = 2-O-methyl modified nucleoside
  modified_base 4: mod_base = OTHER; note = 2-O-methyl modified nucleoside
  modified_base 17: mod_base = OTHER; note = 2-O-methyl modified nucleoside
  modified_base 19: mod_base = OTHER; note = 2-O-methyl modified nucleoside
gaaatgctttgatgagacatt

SEQ ID NO: 4464 - RNA, 21 nt, synthetic construct
  source 1..21: mol_type = other RNA
  modified_base 5: mod_base = OTHER; note = 2-fluoro-modified nucleoside
  modified_base 7: mod_base = OTHER; note = 2-fluoro-modified nucleoside
  modified_base 9: mod_base = OTHER; note = 2-fluoro-modified nucleoside
  modified_base 19^20: mod_base = OTHER; note = phosphorothioate linkage
  modified_base 20^21: mod_base = OTHER; note = phosphorothioate linkage
gaaatgctttgatgagacatt

SEQ ID NO: 4465 - RNA, 21 nt, synthetic construct
  source 1..21: mol_type = other RNA
  modified_base 5: mod_base = OTHER; note = 2-fluoro-modified nucleoside
  modified_base 7: mod_base = OTHER; note = 2-fluoro-modified nucleoside
  modified_base 9: mod_base = OTHER; note = 2-fluoro-modified nucleoside
  modified_base 10: mod_base = OTHER; note = 2-fluoro-modified nucleoside
  modified_base 19^20: mod_base = OTHER; note = phosphorothioate linkage
  modified_base 20^21: mod_base = OTHER; note = phosphorothioate linkage
  modified_base 1: mod_base = OTHER; note = 2-O-methyl modified nucleoside
  modified_base 2: mod_base = OTHER; note = 2-O-methyl modified nucleoside
  modified_base 3: mod_base = OTHER; note = 2-O-methyl modified nucleoside
  modified_base 19: mod_base = OTHER; note = 2-O-methyl modified nucleoside
  modified_base 21: mod_base = OTHER; note = 2-O-methyl modified nucleoside
gaaatgctttgatgagacatt

SEQ ID NO: 4466 - RNA, 21 nt, synthetic construct
  source 1..21: mol_type = other RNA
  modified_base 5: mod_base = OTHER; note = 2-fluoro-modified nucleoside
  modified_base 7: mod_base = OTHER; note = 2-fluoro-modified nucleoside
  modified_base 8: mod_base = OTHER; note = 2-fluoro-modified nucleoside
  modified_base 9: mod_base = OTHER; note = 2-fluoro-modified nucleoside
  modified_base 10: mod_base = OTHER; note = 2-fluoro-modified nucleoside
  modified_base 19^20: mod_base = OTHER; note = phosphorothioate linkage
  modified_base 20^21: mod_base = OTHER; note = phosphorothioate linkage
gaaatgctttgatgagacatt

SEQ ID NO: 4467 - RNA, 21 nt, synthetic construct
  source 1..21: mol_type = other RNA
  modified_base 6: mod_base = OTHER; note = 2-fluoro-modified nucleoside
  modified_base 9: mod_base = OTHER; note = 2-fluoro-modified nucleoside
  modified_base 11: mod_base = OTHER; note = 2-fluoro-modified nucleoside
  modified_base 19^20: mod_base = OTHER; note = phosphorothioate linkage
  modified_base 20^21: mod_base = OTHER; note = phosphorothioate linkage
acatacagcttgtctgagatt

SEQ ID NO: 4468 - RNA, 21 nt, synthetic construct
  source 1..21: mol_type = other RNA
  modified_base 6: mod_base = OTHER; note = 2-fluoro-modified nucleoside
  modified_base 9: mod_base = OTHER; note = 2-fluoro-modified nucleoside
  modified_base 10: mod_base = OTHER; note = 2-fluoro-modified nucleoside
  modified_base 19^20: mod_base = OTHER; note = phosphorothioate linkage
  modified_base 20^21: mod_base = OTHER; note = phosphorothioate linkage
acatacagcttgtctgagatt

SEQ ID NO: 4469 - RNA, 21 nt, synthetic construct
  source 1..21: mol_type = other RNA
  modified_base 6: mod_base = OTHER; note = 2-fluoro-modified nucleoside
  modified_base 9: mod_base = OTHER; note = 2-fluoro-modified nucleoside
  modified_base 10: mod_base = OTHER; note = 2-fluoro-modified nucleoside
  modified_base 19^20: mod_base = OTHER; note = phosphorothioate linkage
  modified_base 20^21: mod_base = OTHER; note = phosphorothioate linkage
  modified_base 1: mod_base = OTHER; note = 2-O-methyl modified nucleoside
  modified_base 2: mod_base = OTHER; note = 2-O-methyl modified nucleoside
  modified_base 3: mod_base = OTHER; note = 2-O-methyl modified nucleoside
  modified_base 15: mod_base = OTHER; note = 2-O-methyl modified nucleoside
  modified_base 13: mod_base = OTHER; note = 2-O-methyl modified nucleoside
tgatccggctgaagaagaatt

SEQ ID NO: 4470 - RNA, 21 nt, synthetic construct
  source 1..21: mol_type = other RNA
  modified_base 5: mod_base = OTHER; note = 2-fluoro-modified nucleoside
  modified_base 9: mod_base = OTHER; note = 2-fluoro-modified nucleoside
  modified_base 10: mod_base = OTHER; note = 2-fluoro-modified nucleoside
  modified_base 19^20: mod_base = OTHER; note = phosphorothioate linkage
  modified_base 20^21: mod_base = OTHER; note = phosphorothioate linkage
tgatccggctgaagaagaatt

SEQ ID NO: 4471 - RNA, 21 nt, synthetic construct
  source 1..21: mol_type = other RNA
  modified_base 5: mod_base = OTHER; note = 2-fluoro-modified nucleoside
  modified_base 6: mod_base = OTHER; note = 2-fluoro-modified nucleoside
  modified_base 9: mod_base = OTHER; note = 2-fluoro-modified nucleoside
  modified_base 19^20: mod_base = OTHER; note = phosphorothioate linkage
  modified_base 20^21: mod_base = OTHER; note = phosphorothioate linkage
tgatccggctgaagaagaatt

SEQ ID NO: 4472 - RNA, 21 nt, synthetic construct
  source 1..21: mol_type = other RNA
  modified_base 5: mod_base = OTHER; note = 2-fluoro-modified nucleoside
  modified_base 6: mod_base = OTHER; note = 2-fluoro-modified nucleoside
  modified_base 9: mod_base = OTHER; note = 2-fluoro-modified nucleoside
  modified_base 10: mod_base = OTHER; note = 2-fluoro-modified nucleoside
  modified_base 19^20: mod_base = OTHER; note = phosphorothioate linkage
  modified_base 20^21: mod_base = OTHER; note = phosphorothioate linkage
tgatccggctgaagaagaatt

SEQ ID NO: 4473 - RNA, 21 nt, synthetic construct
  source 1..21: mol_type = other RNA
  modified_base 5: mod_base = OTHER; note = 2-fluoro-modified nucleoside
  modified_base 8: mod_base = OTHER; note = 2-fluoro-modified nucleoside
  modified_base 9: mod_base = OTHER; note = 2-fluoro-modified nucleoside
  modified_base 19^20: mod_base = OTHER; note = phosphorothioate linkage
  modified_base 20^21: mod_base = OTHER; note = phosphorothioate linkage
  modified_base 1: mod_base = OTHER; note = 2-O-methyl modified nucleoside
  modified_base 2: mod_base = OTHER; note = 2-O-methyl modified nucleoside
  modified_base 3: mod_base = OTHER; note = 2-O-methyl modified nucleoside
  modified_base 19: mod_base = OTHER; note = 2-O-methyl modified nucleoside
  modified_base 21: mod_base = OTHER; note = 2-O-methyl modified nucleoside
gatccggctgaagaagaaatt

SEQ ID NO: 4474 - RNA, 21 nt, synthetic construct
  source 1..21: mol_type = other RNA
  modified_base 6: mod_base = OTHER; note = 2-fluoro-modified nucleoside
  modified_base 9: mod_base = OTHER; note = 2-fluoro-modified nucleoside
  modified_base 10: mod_base = OTHER; note = 2-fluoro-modified nucleoside
  modified_base 19^20: mod_base = OTHER; note = phosphorothioate linkage
  modified_base 20^21: mod_base = OTHER; note = phosphorothioate linkage
aggacacaagtgccagatatt

SEQ ID NO: 4475 - RNA, 21 nt, synthetic construct
  source 1..21: mol_type = other RNA
  modified_base 6: mod_base = OTHER; note = 2-fluoro-modified nucleoside
  modified_base 8: mod_base = OTHER; note = 2-fluoro-modified nucleoside
  modified_base 9: mod_base = OTHER; note = 2-fluoro-modified nucleoside
  modified_base 19^20: mod_base = OTHER; note = phosphorothioate linkage
  modified_base 20^21: mod_base = OTHER; note = phosphorothioate linkage
  modified_base 1: mod_base = OTHER; note = 2-O-methyl modified nucleoside
  modified_base 2: mod_base = OTHER; note = 2-O-methyl modified nucleoside
  modified_base 15: mod_base = OTHER; note = 2-O-methyl modified nucleoside
  modified_base 16: mod_base = OTHER; note = 2-O-methyl modified nucleoside
aggacacaagtgccagatatt

SEQ ID NO: 4476 - RNA, 21 nt, synthetic construct
  source 1..21: mol_type = other RNA
  modified_base 7: mod_base = OTHER; note = 2-fluoro-modified nucleoside
  modified_base 9: mod_base = OTHER; note = 2-fluoro-modified nucleoside
  modified_base 11: mod_base = OTHER; note = 2-fluoro-modified nucleoside
  modified_base 19^20: mod_base = OTHER; note = phosphorothioate linkage
  modified_base 20^21: mod_base = OTHER; note = phosphorothioate linkage
ccaactatgtggactggaatt

SEQ ID NO: 4477 - RNA, 21 nt, synthetic construct
  source 1..21: mol_type = other RNA
  modified_base 5: mod_base = OTHER; note = 2-fluoro-modified nucleoside
  modified_base 7: mod_base = OTHER; note = 2-fluoro-modified nucleoside
  modified_base 9: mod_base = OTHER; note = 2-fluoro-modified nucleoside
  modified_base 19^20: mod_base = OTHER; note = phosphorothioate linkage
  modified_base 20^21: mod_base = OTHER; note = phosphorothioate linkage
caactatgtggactggatatt

SEQ ID NO: 4478 - RNA, 21 nt, synthetic construct
  source 1..21: mol_type = other RNA
  modified_base 5: mod_base = OTHER; note = 2-fluoro-modified nucleoside
  modified_base 8: mod_base = OTHER; note = 2-fluoro-modified nucleoside
  modified_base 9: mod_base = OTHER; note = 2-fluoro-modified nucleoside
  modified_base 19^20: mod_base = OTHER; note = phosphorothioate linkage
  modified_base 20^21: mod_base = OTHER; note = phosphorothioate linkage
  modified_base 1: mod_base = OTHER; note = 2-O-methyl modified nucleoside
  modified_base 2: mod_base = OTHER; note = 2-O-methyl modified nucleoside
  modified_base 3: mod_base = OTHER; note = 2-O-methyl modified nucleoside
  modified_base 19: mod_base = OTHER; note = 2-O-methyl modified nucleoside
  modified_base 15: mod_base = OTHER; note = 2-O-methyl modified nucleoside
ctatgtggactggatcaaatt

SEQ ID NO: 4479 - RNA, 21 nt, synthetic construct
  source 1..21: mol_type = other RNA
  modified_base 5: mod_base = OTHER; note = 2-fluoro-modified nucleoside
  modified_base 7: mod_base = OTHER; note = 2-fluoro-modified nucleoside
  modified_base 9: mod_base = OTHER; note = 2-fluoro-modified nucleoside
  modified_base 19^20: mod_base = OTHER; note = phosphorothioate linkage
  modified_base 20^21: mod_base = OTHER; note = phosphorothioate linkage
  modified_base 1: mod_base = OTHER; note = 2-O-methyl modified nucleoside
  modified_base 2: mod_base = OTHER; note = 2-O-methyl modified nucleoside
  modified_base 3: mod_base = OTHER; note = 2-O-methyl modified nucleoside
  modified_base 19: mod_base = OTHER; note = 2-O-methyl modified nucleoside
  modified_base 21: mod_base = OTHER; note = 2-O-methyl modified nucleoside
ctatgtggactggatcaaatt

SEQ ID NO: 4480 - RNA, 21 nt, synthetic construct
  source 1..21: mol_type = other RNA
  modified_base 5: mod_base = OTHER; note = 2-fluoro-modified nucleoside
  modified_base 9: mod_base = OTHER; note = 2-fluoro-modified nucleoside
  modified_base 10: mod_base = OTHER; note = 2-fluoro-modified nucleoside
  modified_base 19^20: mod_base = OTHER; note = phosphorothioate linkage
  modified_base 20^21: mod_base = OTHER; note = phosphorothioate linkage
  modified_base 1: mod_base = OTHER; note = 2-O-methyl modified nucleoside
  modified_base 2: mod_base = OTHER; note = 2-O-methyl modified nucleoside
  modified_base 3: mod_base = OTHER; note = 2-O-methyl modified nucleoside
  modified_base 4: mod_base = OTHER; note = 2-O-methyl modified nucleoside
  modified_base 11: mod_base = OTHER; note = 2-O-methyl modified nucleoside
  modified_base 14: mod_base = OTHER; note = 2-O-methyl modified nucleoside
tatgtggactggatcaacatt

SEQ ID NO: 4481 - RNA, 21 nt, synthetic construct
  source 1..21: mol_type = other RNA
  modified_base 8: mod_base = OTHER; note = 2-fluoro-modified nucleoside
  modified_base 9: mod_base = OTHER; note = 2-fluoro-modified nucleoside
  modified_base 19^20: mod_base = OTHER; note = phosphorothioate linkage
  modified_base 20^21: mod_base = OTHER; note = phosphorothioate linkage
atgtggactggatcaacgatt

SEQ ID NO: 4482 - DNA, 21 bp, synthetic construct
  misc_feature 9: note = DNA
  misc_feature 1..8: note = RNA
  misc_feature 10..21: note = RNA
  source 1..21: mol_type = other DNA
  modified_base 19..21: mod_base = OTHER; note = phosphorothioate linkage
  modified_base 5: mod_base = OTHER; note = 2-fluoro-modified nucleoside
  modified_base 7..8: mod_base = OTHER; note = 2-fluoro-modified nucleoside
  modified_base 10: mod_base = OTHER; note = 2-fluoro-modified nucleoside
  modified_base 1..4: mod_base = OTHER; note = 2-O-methyl modified nucleoside
  modified_base 6: mod_base = OTHER; note = 2-O-methyl modified nucleoside
  modified_base 11..21: mod_base = OTHER; note = 2-O-methyl modified nucleoside
atgtggactggatcaacgatt

SEQ ID NO: 4483 - RNA, 21 nt, synthetic construct
  source 1..21: mol_type = other RNA
  modified_base 2: mod_base = OTHER; note = 2-fluoro-modified nucleoside
  modified_base 4: mod_base = OTHER; note = 2-fluoro-modified nucleoside
  modified_base 6: mod_base = OTHER; note = 2-fluoro-modified nucleoside
  modified_base 8: mod_base = OTHER; note = 2-fluoro-modified nucleoside
  modified_base 10: mod_base = OTHER; note = 2-fluoro-modified nucleoside
  modified_base 12: mod_base = OTHER; note = 2-fluoro-modified nucleoside
  modified_base 14: mod_base = OTHER; note = 2-fluoro-modified nucleoside
  modified_base 16: mod_base = OTHER; note = 2-fluoro-modified nucleoside
  modified_base 18: mod_base = OTHER; note = 2-fluoro-modified nucleoside
  modified_base 19^20: mod_base = OTHER; note = phosphorothioate linkage
  modified_base 20^21: mod_base = OTHER; note = phosphorothioate linkage
  modified_base 1^2: mod_base = OTHER; note = phosphorothioate linkage
  modified_base 2^3: mod_base = OTHER; note = phosphorothioate linkage
taagcatttctctgtgccgtt

SEQ ID NO: 4484 - RNA, 21 nt, synthetic construct
  source 1..21: mol_type = other RNA
  modified_base 2: mod_base = OTHER; note = 2-fluoro-modified nucleoside
  modified_base 4: mod_base = OTHER; note = 2-fluoro-modified nucleoside
  modified_base 6: mod_base = OTHER; note = 2-fluoro-modified nucleoside
  modified_base 8: mod_base = OTHER; note = 2-fluoro-modified nucleoside
  modified_base 10: mod_base = OTHER; note = 2-fluoro-modified nucleoside
  modified_base 12: mod_base = OTHER; note = 2-fluoro-modified nucleoside
  modified_base 14: mod_base = OTHER; note = 2-fluoro-modified nucleoside
  modified_base 16: mod_base = OTHER; note = 2-fluoro-modified nucleoside
  modified_base 18: mod_base = OTHER; note = 2-fluoro-modified nucleoside
  modified_base 1^2: mod_base = OTHER; note = phosphorothioate linkage
  modified_base 2^3: mod_base = OTHER; note = phosphorothioate linkage
  modified_base 19^20: mod_base = OTHER; note = phosphorothioate linkage
  modified_base 20^21: mod_base = OTHER; note = phosphorothioate linkage
taaagcatttctctgtgcctt

SEQ ID NO: 4485 - RNA, 21 nt, synthetic construct
  source 1..21: mol_type = other RNA
  modified_base 2: mod_base = OTHER; note = 2-fluoro-modified nucleoside
  modified_base 4: mod_base = OTHER; note = 2-fluoro-modified nucleoside
  modified_base 6: mod_base = OTHER; note = 2-fluoro-modified nucleoside
  modified_base 8: mod_base = OTHER; note = 2-fluoro-modified nucleoside
  modified_base 10: mod_base = OTHER; note = 2-fluoro-modified nucleoside
  modified_base 12: mod_base = OTHER; note = 2-fluoro-modified nucleoside
  modified_base 14: mod_base = OTHER; note = 2-fluoro-modified nucleoside
  modified_base 16: mod_base = OTHER; note = 2-fluoro-modified nucleoside
  modified_base 18: mod_base = OTHER; note = 2-fluoro-modified nucleoside
  modified_base 1^2: mod_base = OTHER; note = phosphorothioate linkage
  modified_base 2^3: mod_base = OTHER; note = phosphorothioate linkage
  modified_base 19^20: mod_base = OTHER; note = phosphorothioate linkage
  modified_base 20^21: mod_base = OTHER; note = phosphorothioate linkage
tcaaagcatttctctgtgctt

SEQ ID NO: 4486 - RNA, 21 nt, synthetic construct
  source 1..21: mol_type = other RNA
  modified_base 2: mod_base = OTHER; note = 2-fluoro-modified nucleoside
  modified_base 4: mod_base = OTHER; note = 2-fluoro-modified nucleoside
  modified_base 6: mod_base = OTHER; note = 2-fluoro-modified nucleoside
  modified_base 8: mod_base = OTHER; note = 2-fluoro-modified nucleoside
  modified_base 10: mod_base = OTHER; note = 2-fluoro-modified nucleoside
  modified_base 12: mod_base = OTHER; note = 2-fluoro-modified nucleoside
  modified_base 14: mod_base = OTHER; note = 2-fluoro-modified nucleoside
  modified_base 16: mod_base = OTHER; note = 2-fluoro-modified nucleoside
  modified_base 18: mod_base = OTHER; note = 2-fluoro-modified nucleoside
  modified_base 1^2: mod_base = OTHER; note = phosphorothioate linkage
  modified_base 2^3: mod_base = OTHER; note = phosphorothioate linkage
  modified_base 19^20: mod_base = OTHER; note = phosphorothioate linkage
  modified_base 20^21: mod_base = OTHER; note = phosphorothioate linkage
ttcaaagcatttctctgtgtt

SEQ ID NO: 4487 - RNA, 21 nt, synthetic construct
  source 1..21: mol_type = other RNA
  modified_base 2: mod_base = OTHER; note = 2-fluoro-modified nucleoside
  modified_base 4: mod_base = OTHER; note = 2-fluoro-modified nucleoside
  modified_base 6: mod_base = OTHER; note = 2-fluoro-modified nucleoside
  modified_base 8: mod_base = OTHER; note = 2-fluoro-modified nucleoside
  modified_base 10: mod_base = OTHER; note = 2-fluoro-modified nucleoside
  modified_base 12: mod_base = OTHER; note = 2-fluoro-modified nucleoside
  modified_base 14: mod_base = OTHER; note = 2-fluoro-modified nucleoside
  modified_base 16: mod_base = OTHER; note = 2-fluoro-modified nucleoside
  modified_base 18: mod_base = OTHER; note = 2-fluoro-modified nucleoside
  modified_base 1^2: mod_base = OTHER; note = phosphorothioate linkage
  modified_base 2^3: mod_base = OTHER; note = phosphorothioate linkage
  modified_base 19^20: mod_base = OTHER; note = phosphorothioate linkage
  modified_base 20^21: mod_base = OTHER; note = phosphorothioate linkage
tatcaaagcatttctctgttt

SEQ ID NO: 4488 - RNA, 21 nt, synthetic construct
  source 1..21: mol_type = other RNA
  modified_base 2: mod_base = OTHER; note = 2-fluoro-modified nucleoside
  modified_base 4: mod_base = OTHER; note = 2-fluoro-modified nucleoside
  modified_base 6: mod_base = OTHER; note = 2-fluoro-modified nucleoside
  modified_base 8: mod_base = OTHER; note = 2-fluoro-modified nucleoside
  modified_base 10: mod_base = OTHER; note = 2-fluoro-modified nucleoside
  modified_base 12: mod_base = OTHER; note = 2-fluoro-modified nucleoside
  modified_base 14: mod_base = OTHER; note = 2-fluoro-modified nucleoside
  modified_base 16: mod_base = OTHER; note = 2-fluoro-modified nucleoside
  modified_base 18: mod_base = OTHER; note = 2-fluoro-modified nucleoside
  modified_base 1^2: mod_base = OTHER; note = phosphorothioate linkage
  modified_base 2^3: mod_base = OTHER; note = phosphorothioate linkage
  modified_base 19^20: mod_base = OTHER; note = phosphorothioate linkage
  modified_base 20^21: mod_base = OTHER; note = phosphorothioate linkage
tcatcaaagcatttctctgtt

SEQ ID NO: 4489 - RNA, 21 nt, synthetic construct
  source 1..21: mol_type = other RNA
  modified_base 2: mod_base = OTHER; note = 2-fluoro-modified nucleoside
  modified_base 4: mod_base = OTHER; note = 2-fluoro-modified nucleoside
  modified_base 6: mod_base = OTHER; note = 2-fluoro-modified nucleoside
  modified_base 8: mod_base = OTHER; note = 2-fluoro-modified nucleoside
  modified_base 10: mod_base = OTHER; note = 2-fluoro-modified nucleoside
  modified_base 12: mod_base = OTHER; note = 2-fluoro-modified nucleoside
  modified_base 14: mod_base = OTHER; note = 2-fluoro-modified nucleoside
  modified_base 16: mod_base = OTHER; note = 2-fluoro-modified nucleoside
  modified_base 18: mod_base = OTHER; note = 2-fluoro-modified nucleoside
  modified_base 1^2: mod_base = OTHER; note = phosphorothioate linkage
  modified_base 2^3: mod_base = OTHER; note = phosphorothioate linkage
  modified_base 19^20: mod_base = OTHER; note = phosphorothioate linkage
  modified_base 20^21: mod_base = OTHER; note = phosphorothioate linkage
ttcatcaaagcatttctcttt

SEQ ID NO: 4490 - RNA, 21 nt, synthetic construct
  source 1..21: mol_type = other RNA
  modified_base 2: mod_base = OTHER; note = 2-fluoro-modified nucleoside
  modified_base 4: mod_base = OTHER; note = 2-fluoro-modified nucleoside
  modified_base 6: mod_base = OTHER; note = 2-fluoro-modified nucleoside
  modified_base 8: mod_base = OTHER; note = 2-fluoro-modified nucleoside
  modified_base 10: mod_base = OTHER; note = 2-fluoro-modified nucleoside
  modified_base 12: mod_base = OTHER; note = 2-fluoro-modified nucleoside
  modified_base 14: mod_base = OTHER; note = 2-fluoro-modified nucleoside
  modified_base 16: mod_base = OTHER; note = 2-fluoro-modified nucleoside
  modified_base 18: mod_base = OTHER; note = 2-fluoro-modified nucleoside
  modified_base 1^2: mod_base = OTHER; note = phosphorothioate linkage
  modified_base 2^3: mod_base = OTHER; note = phosphorothioate linkage
  modified_base 19^20: mod_base = OTHER; note = phosphorothioate linkage
  modified_base 20^21: mod_base = OTHER; note = phosphorothioate linkage
tgtctcatcaaagcatttctt

SEQ ID NO: 4491 - RNA, 21 nt, synthetic construct
  source 1..21: mol_type = other RNA
  modified_base 2: mod_base = OTHER; note = 2-fluoro-modified nucleoside
  modified_base 4: mod_base = OTHER; note = 2-fluoro-modified nucleoside
  modified_base 6: mod_base = OTHER; note = 2-fluoro-modified nucleoside
  modified_base 8: mod_base = OTHER; note = 2-fluoro-modified nucleoside
  modified_base 10: mod_base = OTHER; note = 2-fluoro-modified nucleoside
  modified_base 12: mod_base = OTHER; note = 2-fluoro-modified nucleoside
  modified_base 14: mod_base = OTHER; note = 2-fluoro-modified nucleoside
  modified_base 16: mod_base = OTHER; note = 2-fluoro-modified nucleoside
  modified_base 18: mod_base = OTHER; note = 2-fluoro-modified nucleoside
  modified_base 1^2: mod_base = OTHER; note = phosphorothioate linkage
  modified_base 2^3: mod_base = OTHER; note = phosphorothioate linkage
  modified_base 19^20: mod_base = OTHER; note = phosphorothioate linkage
  modified_base 20^21: mod_base = OTHER; note = phosphorothioate linkage
tctcagacaagctgtatgttt

SEQ ID NO: 4492 - RNA, 21 nt, synthetic construct
  source 1..21: mol_type = other RNA
  modified_base 2: mod_base = OTHER; note = 2-fluoro-modified nucleoside
  modified_base 4: mod_base = OTHER; note = 2-fluoro-modified nucleoside
  modified_base 6: mod_base = OTHER; note = 2-fluoro-modified nucleoside
  modified_base 8: mod_base = OTHER; note = 2-fluoro-modified nucleoside
  modified_base 10: mod_base = OTHER; note = 2-fluoro-modified nucleoside
  modified_base 12: mod_base = OTHER; note = 2-fluoro-modified nucleoside
  modified_base 14: mod_base = OTHER; note = 2-fluoro-modified nucleoside
  modified_base 16: mod_base = OTHER; note = 2-fluoro-modified nucleoside
  modified_base 18: mod_base = OTHER; note = 2-fluoro-modified nucleoside
  modified_base 1^2: mod_base = OTHER; note = phosphorothioate linkage
  modified_base 2^3: mod_base = OTHER; note = phosphorothioate linkage
  modified_base 19^20: mod_base = OTHER; note = phosphorothioate linkage
  modified_base 20^21: mod_base = OTHER; note = phosphorothioate linkage
ttcttcttcagccggatcatt

SEQ ID NO: 4493 - RNA, 21 nt, synthetic construct
  source 1..21: mol_type = other RNA
  modified_base 2: mod_base = OTHER; note = 2-fluoro-modified nucleoside
  modified_base 4: mod_base = OTHER; note = 2-fluoro-modified nucleoside
  modified_base 6: mod_base = OTHER; note = 2-fluoro-modified nucleoside
  modified_base 8: mod_base = OTHER; note = 2-fluoro-modified nucleoside
  modified_base 10: mod_base = OTHER; note = 2-fluoro-modified nucleoside
  modified_base 12: mod_base = OTHER; note = 2-fluoro-modified nucleoside
  modified_base 14: mod_base = OTHER; note = 2-fluoro-modified nucleoside
  modified_base 16: mod_base = OTHER; note = 2-fluoro-modified nucleoside
  modified_base 18: mod_base = OTHER; note = 2-fluoro-modified nucleoside
  modified_base 1^2: mod_base = OTHER; note = phosphorothioate linkage
  modified_base 2^3: mod_base = OTHER; note = phosphorothioate linkage
  modified_base 19^20: mod_base = OTHER; note = phosphorothioate linkage
  modified_base 20^21: mod_base = OTHER; note = phosphorothioate linkage
tttcttcttcagccggatctt

SEQ ID NO: 4494 - RNA, 21 nt, synthetic construct
  source 1..21: mol_type = other RNA
  modified_base 2: mod_base = OTHER; note = 2-fluoro-modified nucleoside
  modified_base 4: mod_base = OTHER; note = 2-fluoro-modified nucleoside
  modified_base 6: mod_base = OTHER; note = 2-fluoro-modified nucleoside
  modified_base 8: mod_base = OTHER; note = 2-fluoro-modified nucleoside
  modified_base 10: mod_base = OTHER; note = 2-fluoro-modified nucleoside
  modified_base 12: mod_base = OTHER; note = 2-fluoro-modified nucleoside
  modified_base 14: mod_base = OTHER; note = 2-fluoro-modified nucleoside
  modified_base 16: mod_base = OTHER; note = 2-fluoro-modified nucleoside
  modified_base 18: mod_base = OTHER; note = 2-fluoro-modified nucleoside
  modified_base 1^2: mod_base = OTHER; note = phosphorothioate linkage
  modified_base 2^3: mod_base = OTHER; note = phosphorothioate linkage
  modified_base 19^20: mod_base = OTHER; note = phosphorothioate linkage
  modified_base 20^21: mod_base = OTHER; note = phosphorothioate linkage
tatctggcacttgtgtccttt

SEQ ID NO: 4495 - RNA, 21 nt, synthetic construct
  source 1..21: mol_type = other RNA
  modified_base 2: mod_base = OTHER; note = 2-fluoro-modified nucleoside
  modified_base 4: mod_base = OTHER; note = 2-fluoro-modified nucleoside
  modified_base 6: mod_base = OTHER; note = 2-fluoro-modified nucleoside
  modified_base 8: mod_base = OTHER; note = 2-fluoro-modified nucleoside
  modified_base 10: mod_base = OTHER; note = 2-fluoro-modified nucleoside
  modified_base 12: mod_base = OTHER; note = 2-fluoro-modified nucleoside
  modified_base 14: mod_base = OTHER; note = 2-fluoro-modified nucleoside
  modified_base 16: mod_base = OTHER; note = 2-fluoro-modified nucleoside
  modified_base 18: mod_base = OTHER; note = 2-fluoro-modified nucleoside
  modified_base 1^2: mod_base = OTHER; note = phosphorothioate linkage
  modified_base 2^3: mod_base = OTHER; note = phosphorothioate linkage
  modified_base 19^20: mod_base = OTHER; note = phosphorothioate linkage
  modified_base 20^21: mod_base = OTHER; note = phosphorothioate linkage
ttccagtccacatagttggtt

SEQ ID NO: 4496 - RNA, 21 nt, synthetic construct
  source 1..21: mol_type = other RNA
  modified_base 2: mod_base = OTHER; note = 2-fluoro-modified nucleoside
  modified_base 4: mod_base = OTHER; note = 2-fluoro-modified nucleoside
  modified_base 6: mod_base = OTHER; note = 2-fluoro-modified nucleoside
  modified_base 8: mod_base = OTHER; note = 2-fluoro-modified nucleoside
  modified_base 10: mod_base = OTHER; note = 2-fluoro-modified nucleoside
  modified_base 12: mod_base = OTHER; note = 2-fluoro-modified nucleoside
  modified_base 14: mod_base = OTHER; note = 2-fluoro-modified nucleoside
  modified_base 16: mod_base = OTHER; note = 2-fluoro-modified nucleoside
  modified_base 18: mod_base = OTHER; note = 2-fluoro-modified nucleoside
  modified_base 1^2: mod_base = OTHER; note = phosphorothioate linkage
  modified_base 2^3: mod_base = OTHER; note = phosphorothioate linkage
  modified_base 19^20: mod_base = OTHER; note = phosphorothioate linkage
  modified_base 20^21: mod_base = OTHER; note = phosphorothioate linkage
tatccagtccacatagttgtt

SEQ ID NO: 4497 - RNA, 21 nt, synthetic construct
  source 1..21: mol_type = other RNA
  modified_base 2: mod_base = OTHER; note = 2-fluoro-modified nucleoside
  modified_base 4: mod_base = OTHER; note = 2-fluoro-modified nucleoside
  modified_base 6: mod_base = OTHER; note = 2-fluoro-modified nucleoside
  modified_base 8: mod_base = OTHER; note = 2-fluoro-modified nucleoside
  modified_base 10: mod_base = OTHER; note = 2-fluoro-modified nucleoside
  modified_base 12: mod_base = OTHER; note = 2-fluoro-modified nucleoside
  modified_base 14: mod_base = OTHER; note = 2-fluoro-modified nucleoside
  modified_base 16: mod_base = OTHER; note = 2-fluoro-modified nucleoside
  modified_base 18: mod_base = OTHER; note = 2-fluoro-modified nucleoside
  modified_base 1^2: mod_base = OTHER; note = phosphorothioate linkage
  modified_base 2^3: mod_base = OTHER; note = phosphorothioate linkage
  modified_base 19^20: mod_base = OTHER; note = phosphorothioate linkage
  modified_base 20^21: mod_base = OTHER; note = phosphorothioate linkage
tttgatccagtccacatagtt

SEQ ID NO: 4498 - RNA, 21 nt, synthetic construct
  source 1..21: mol_type = other RNA
  modified_base 2: mod_base = OTHER; note = 2-fluoro-modified nucleoside
  modified_base 4: mod_base = OTHER; note = 2-fluoro-modified nucleoside
  modified_base 6: mod_base = OTHER; note = 2-fluoro-modified nucleoside
  modified_base 10: mod_base = OTHER; note = 2-fluoro-modified nucleoside
  modified_base 12: mod_base = OTHER; note = 2-fluoro-modified nucleoside
  modified_base 14: mod_base = OTHER; note = 2-fluoro-modified nucleoside
  modified_base 16: mod_base = OTHER; note = 2-fluoro-modified nucleoside
  modified_base 18: mod_base = OTHER; note = 2-fluoro-modified nucleoside
  modified_base 1^2: mod_base = OTHER; note = phosphorothioate linkage
  modified_base 2^3: mod_base = OTHER; note = phosphorothioate linkage
  modified_base 19^20: mod_base = OTHER; note = phosphorothioate linkage
  modified_base 20^21: mod_base = OTHER; note = phosphorothioate linkage
tgttgatccagtccacatatt

SEQ ID NO: 4499 - RNA, 21 nt, synthetic construct
  source 1..21: mol_type = other RNA
  modified_base 2: mod_base = OTHER; note = 2-fluoro-modified nucleoside
  modified_base 4: mod_base = OTHER; note = 2-fluoro-modified nucleoside
  modified_base 6: mod_base = OTHER; note = 2-fluoro-modified nucleoside
  modified_base 8: mod_base = OTHER; note = 2-fluoro-modified nucleoside
  modified_base 10: mod_base = OTHER; note = 2-fluoro-modified nucleoside
  modified_base 12: mod_base = OTHER; note = 2-fluoro-modified nucleoside
  modified_base 14: mod_base = OTHER; note = 2-fluoro-modified nucleoside
  modified_base 16: mod_base = OTHER; note = 2-fluoro-modified nucleoside
  modified_base 18: mod_base = OTHER; note = 2-fluoro-modified nucleoside
  modified_base 1^2: mod_base = OTHER; note = phosphorothioate linkage
  modified_base 2^3: mod_base = OTHER; note = phosphorothioate linkage
  modified_base 19^20: mod_base = OTHER; note = phosphorothioate linkage
  modified_base 20^21: mod_base = OTHER; note = phosphorothioate linkage
tcgttgatccagtccacattt

SEQ ID NO: 4500 - RNA, 21 nt, synthetic construct
  source 1..21: mol_type = other RNA; note = ETL17 GalNac Moiety
  modified_base 6: mod_base = OTHER; note = 2-fluoro-modified nucleoside
  modified_base 7: mod_base = OTHER; note = 2-fluoro-modified nucleoside
  modified_base 9: mod_base = OTHER; note = 2-fluoro-modified nucleoside
  modified_base 1: mod_base = OTHER; note = phosphorothioate linkage; note = 2-O-methyl modified nucleoside
  modified_base 19^20: mod_base = OTHER; note = phosphorothioate linkage
  modified_base 20^21: mod_base = OTHER; note = phosphorothioate linkage
  modified_base 2: mod_base = OTHER; note = 2-O-methyl modified nucleoside
  modified_base 3: mod_base = OTHER; note = 2-O-methyl modified nucleoside
  modified_base 4: mod_base = OTHER; note = 2-O-methyl modified nucleoside
  modified_base 19: mod_base = OTHER; note = 2-O-methyl modified nucleoside
  modified_base 21: mod_base = OTHER; note = 2-O-methyl modified nucleoside
  modified_base 15: mod_base = OTHER; note = 2-O-methyl modified nucleoside
  modified_base 12: mod_base = OTHER; note = 2-O-methyl modified nucleoside
  modified_base 17: mod_base = OTHER; note = 2-O-methyl modified nucleoside
aacctaatgccacagcgaatt

SEQ ID NO: 4501 - DNA, 21 bp, synthetic construct
  misc_feature 9: note = DNA
  misc_feature 1..8: note = RNA
  misc_feature 10..21: note = RNA
  source 1..21: mol_type = other DNA
  modified_base 19..21: mod_base = OTHER; note = phosphorothioate linkage
  modified_base 1..4: mod_base = OTHER; note = 2-O-methyl modified nucleoside
  modified_base 6: mod_base = OTHER; note = 2-O-methyl modified nucleoside
  modified_base 11..21: mod_base = OTHER; note = 2-O-methyl modified nucleoside
  modified_base 5: mod_base = OTHER; note = 2-fluoro-modified nucleoside
  modified_base 7..8: mod_base = OTHER; note = 2-fluoro-modified nucleoside
  modified_base 10: mod_base = OTHER; note = 2-fluoro-modified nucleoside
actatcctggtgacctctatt

SEQ ID NO: 4502 - RNA, 21 nt, synthetic construct
  source 1..21: mol_type = other RNA; note = ETL17 GalNac Moiety
  modified_base 6: mod_base = OTHER; note = 2-fluoro-modified nucleoside
  modified_base 8: mod_base = OTHER; note = 2-fluoro-modified nucleoside
  modified_base 9: mod_base = OTHER; note = 2-fluoro-modified nucleoside
  modified_base 11: mod_base = OTHER; note = 2-fluoro-modified nucleoside
  modified_base 1: mod_base = OTHER; note = phosphorothioate linkage; note = 2-O-methyl modified nucleoside
  modified_base 19^20: mod_base = OTHER; note = phosphorothioate linkage
  modified_base 20^21: mod_base = OTHER; note = phosphorothioate linkage
  modified_base 2: mod_base = OTHER; note = 2-O-methyl modified nucleoside
  modified_base 3: mod_base = OTHER; note = 2-O-methyl modified nucleoside
  modified_base 4: mod_base = OTHER; note = 2-O-methyl modified nucleoside
  modified_base 19: mod_base = OTHER; note = 2-O-methyl modified nucleoside
  modified_base 20: mod_base = OTHER; note = 2-O-methyl modified nucleoside
  modified_base 21: mod_base = OTHER; note = 2-O-methyl modified nucleoside
  modified_base 14: mod_base = OTHER; note = 2-O-methyl modified nucleoside
  modified_base 15: mod_base = OTHER; note = 2-O-methyl modified nucleoside
tggtgtgccacaactcacatt

SEQ ID NO: 4503 - RNA, 21 nt, synthetic construct
  source 1..21: mol_type = other RNA; note = ETL17 GalNac Moiety
  modified_base 7: mod_base = OTHER; note = 2-fluoro-modified nucleoside
  modified_base 9: mod_base = OTHER; note = 2-fluoro-modified nucleoside
  modified_base 10: mod_base = OTHER; note = 2-fluoro-modified nucleoside
  modified_base 1: mod_base = OTHER; note = phosphorothioate linkage
  modified_base 19^20: mod_base = OTHER; note = phosphorothioate linkage
  modified_base 20^21: mod_base = OTHER; note = phosphorothioate linkage
tgtgccacaactcacaacatt

SEQ ID NO: 4504 - RNA, 21 nt, synthetic construct
  source 1..21: mol_type = other RNA; note = ETL17 GalNac Moiety
  modified_base 5: mod_base = OTHER; note = 2-fluoro-modified nucleoside
  modified_base 6: mod_base = OTHER; note = 2-fluoro-modified nucleoside
  modified_base 9: mod_base = OTHER; note = 2-fluoro-modified nucleoside
  modified_base 1: mod_base = OTHER; note = phosphorothioate linkage
  modified_base 19^20: mod_base = OTHER; note = phosphorothioate linkage
  modified_base 20^21: mod_base = OTHER; note = phosphorothioate linkage
acaactcacaactacgacatt

SEQ ID NO: 4505 - RNA, 21 nt, synthetic construct
  source 1..21: mol_type = other RNA; note = ETL17 GalNac Moiety
  modified_base 6: mod_base = OTHER; note = 2-fluoro-modified nucleoside
  modified_base 8: mod_base = OTHER; note = 2-fluoro-modified nucleoside
  modified_base 9: mod_base = OTHER; note = 2-fluoro-modified nucleoside
  modified_base 1: mod_base = OTHER; note = phosphorothioate linkage
  modified_base 19^20: mod_base = OTHER; note = phosphorothioate linkage
  modified_base 20^21: mod_base = OTHER; note = phosphorothioate linkage
aactcacaactacgaccgatt

SEQ ID NO: 4506 - RNA, 21 nt, synthetic construct
  source 1..21: mol_type = other RNA; note = ETL17 GalNac Moiety
  modified_base 5: mod_base = OTHER; note = 2-fluoro-modified nucleoside
  modified_base 6: mod_base = OTHER; note = 2-fluoro-modified nucleoside
  modified_base 9: mod_base = OTHER; note = 2-fluoro-modified nucleoside
  modified_base 11: mod_base = OTHER; note = 2-fluoro-modified nucleoside
  modified_base 1: mod_base = OTHER; note = phosphorothioate linkage
  modified_base 19^20: mod_base = OTHER; note = phosphorothioate linkage
  modified_base 20^21: mod_base = OTHER; note = phosphorothioate linkage
tcacaactacgaccgggaatt

SEQ ID NO: 4507 - RNA, 21 nt, synthetic construct
  source 1..21: mol_type = other RNA; note = ETL17 GalNac Moiety
  modified_base 5: mod_base = OTHER; note = 2-fluoro-modified nucleoside
  modified_base 6: mod_base = OTHER; note = 2-fluoro-modified nucleoside
  modified_base 7: mod_base = OTHER; note = 2-fluoro-modified nucleoside
  modified_base 8: mod_base = OTHER; note = 2-fluoro-modified nucleoside
  modified_base 9: mod_base = OTHER; note = 2-fluoro-modified nucleoside
  modified_base 1: mod_base = OTHER; note = phosphorothioate linkage
  modified_base 19^20: mod_base = OTHER; note = phosphorothioate linkage
  modified_base 20^21: mod_base = OTHER; note = phosphorothioate linkage
agaagaggacgttcctgcatt

SEQ ID NO: 4508 - RNA, 21 nt, synthetic construct
  source 1..21: mol_type = other RNA; note = ETL17 GalNac Moiety
  modified_base 5: mod_base = OTHER; note = 2-fluoro-modified nucleoside
  modified_base 6: mod_base = OTHER; note = 2-fluoro-modified nucleoside
  modified_base 7: mod_base = OTHER; note = 2-fluoro-modified nucleoside
  modified_base 8: mod_base = OTHER; note = 2-fluoro-modified nucleoside
  modified_base 9: mod_base = OTHER; note = 2-fluoro-modified nucleoside
  modified_base 1: mod_base = OTHER; note = phosphorothioate linkage
  modified_base 19^20: mod_base = OTHER; note = phosphorothioate linkage
  modified_base 20^21: mod_base = OTHER; note = phosphorothioate linkage
agcacttcttcaaccgcaatt

SEQ ID NO: 4509 - RNA, 21 nt, synthetic construct
  source 1..21: mol_type = other RNA; note = ETL17 GalNac Moiety
  modified_base 5: mod_base = OTHER; note = 2-fluoro-modified nucleoside
  modified_base 6: mod_base = OTHER; note = 2-fluoro-modified nucleoside
  modified_base 7: mod_base = OTHER; note = 2-fluoro-modified nucleoside
  modified_base 8: mod_base = OTHER; note = 2-fluoro-modified nucleoside
  modified_base 9: mod_base = OTHER; note = 2-fluoro-modified nucleoside
  modified_base 1: mod_base = OTHER; note = phosphorothioate linkage
  modified_base 19^20: mod_base = OTHER; note = phosphorothioate linkage
  modified_base 20^21: mod_base = OTHER; note = phosphorothioate linkage
cacttcttcaaccgcacgatt

SEQ ID NO: 4510 - DNA, 21 bp, synthetic construct
  misc_feature 9: note = DNA
  misc_feature 1..8: note = RNA
  misc_feature 10..21: note = RNA
  source 1..21: mol_type = other DNA
  modified_base 19..21: mod_base = OTHER; note = phosphorothioate linkage
  modified_base 1..4: mod_base = OTHER; note = 2-O-methyl modified nucleoside
  modified_base 6: mod_base = OTHER; note = 2-O-methyl modified nucleoside
  modified_base 11..21: mod_base = OTHER; note = 2-O-methyl modified nucleoside
  modified_base 5: mod_base = OTHER; note = 2-fluoro-modified nucleoside
  modified_base 7..8: mod_base = OTHER; note = 2-fluoro-modified nucleoside
  modified_base 10: mod_base = OTHER; note = 2-fluoro-modified nucleoside
acttcttcaaccgcacgaatt

SEQ ID NO: 4511 - DNA, 21 bp, synthetic construct
  misc_feature 9: note = DNA
  misc_feature 1..8: note = RNA
  misc_feature 10..21: note = RNA
  source 1..21: mol_type = other DNA
  modified_base 19..21: mod_base = OTHER; note = phosphorothioate linkage
  modified_base 5: mod_base = OTHER; note = 2-fluoro-modified nucleoside
  modified_base 7..8: mod_base = OTHER; note = 2-fluoro-modified nucleoside
  modified_base 10: mod_base = OTHER; note = 2-fluoro-modified nucleoside
  modified_base 1..4: mod_base = OTHER; note = 2-O-methyl modified nucleoside
  modified_base 6: mod_base = OTHER; note = 2-O-methyl modified nucleoside
  modified_base 11..21: mod_base = OTHER; note = 2-O-methyl modified nucleoside
cttcttcaaccgcacgacatt

SEQ ID NO: 4512 - RNA, 21 nt, synthetic construct
  source 1..21: mol_type = other RNA; note = ETL17 GalNac Moiety
  modified_base 5: mod_base = OTHER; note = 2-fluoro-modified nucleoside
  modified_base 6: mod_base = OTHER; note = 2-fluoro-modified nucleoside
  modified_base 9: mod_base = OTHER; note = 2-fluoro-modified nucleoside
  modified_base 10: mod_base = OTHER; note = 2-fluoro-modified nucleoside
  modified_base 1: mod_base = OTHER; note = 2-O-methyl modified nucleoside; note = phosphorothioate linkage
  modified_base 19^20: mod_base = OTHER; note = phosphorothioate linkage
  modified_base 20^21: mod_base = OTHER; note = phosphorothioate linkage
  modified_base 2: mod_base = OTHER; note = 2-O-methyl modified nucleoside
  modified_base 3: mod_base = OTHER; note = 2-O-methyl modified nucleoside
  modified_base 4: mod_base = OTHER; note = 2-O-methyl modified nucleoside
  modified_base 19: mod_base = OTHER; note = 2-O-methyl modified nucleoside
  modified_base 20: mod_base = OTHER; note = 2-O-methyl modified nucleoside
  modified_base 21: mod_base = OTHER; note = 2-O-methyl modified nucleoside
  modified_base 12: mod_base = OTHER; note = 2-O-methyl modified nucleoside
  modified_base 15: mod_base = OTHER; note = 2-O-methyl modified nucleoside
ttcttcaaccgcacgacgatt

SEQ ID NO: 4513 - RNA, 21 nt, synthetic construct
  source 1..21: mol_type = other RNA; note = ETL17 GalNac Moiety
  modified_base 5: mod_base = OTHER; note = 2-fluoro-modified nucleoside
  modified_base 8: mod_base = OTHER; note = 2-fluoro-modified nucleoside
  modified_base 9: mod_base = OTHER; note = 2-fluoro-modified nucleoside
  modified_base 11: mod_base = OTHER; note = 2-fluoro-modified nucleoside
  modified_base 1: mod_base = OTHER; note = phosphorothioate linkage; note = 2-O-methyl modified nucleoside
  modified_base 19^20: mod_base = OTHER; note = phosphorothioate linkage
  modified_base 20^21: mod_base = OTHER; note = phosphorothioate linkage
  modified_base 13: mod_base = OTHER; note = 2-O-methyl modified nucleoside
  modified_base 18: mod_base = OTHER; note = 2-O-methyl modified nucleoside
  modified_base 20: mod_base = OTHER; note = 2-O-methyl modified nucleoside
  modified_base 21: mod_base = OTHER; note = 2-O-methyl modified nucleoside
  modified_base 2: mod_base = OTHER; note = 2-O-methyl modified nucleoside
  modified_base 3: mod_base = OTHER; note = 2-O-methyl modified nucleoside
  modified_base 4: mod_base = OTHER; note = 2-O-methyl modified nucleoside
tcttcaaccgcacgacggatt

SEQ ID NO: 4514 - RNA, 21 nt, synthetic construct
  source 1..21: mol_type = other RNA; note = ETL17 GalNac Moiety
  modified_base 6: mod_base = OTHER; note = 2-fluoro-modified nucleoside
  modified_base 8: mod_base = OTHER; note = 2-fluoro-modified nucleoside
  modified_base 9: mod_base = OTHER; note = 2-fluoro-modified nucleoside
  modified_base 1: mod_base = OTHER; note = phosphorothioate linkage
  modified_base 19^20: mod_base = OTHER; note = phosphorothioate linkage
  modified_base 20^21: mod_base = OTHER; note = phosphorothioate linkage
  modified_base 2: mod_base = OTHER; note = 2-O-methyl modified nucleoside
  modified_base 20: mod_base = OTHER; note = 2-O-methyl modified nucleoside
  modified_base 21: mod_base = OTHER; note = 2-O-methyl modified nucleoside
  modified_base 15: mod_base = OTHER; note = 2-O-methyl modified nucleoside
  modified_base 4: mod_base = OTHER; note = 2-O-methyl modified nucleoside
  modified_base 2: mod_base = OTHER; note = 2-O-methyl modified nucleoside
  modified_base 3: mod_base = OTHER; note = 2-O-methyl modified nucleoside
  modified_base 11: mod_base = OTHER; note = 2-O-methyl modified nucleoside
ttcggcatcgagaagtacatt

SEQ ID NO: 4515 - RNA, 21 nt, synthetic construct
  source 1..21: mol_type = other RNA; note = ETL17 GalNac Moiety
  modified_base 5: mod_base = OTHER; note = 2-fluoro-modified nucleoside
  modified_base 6: mod_base = OTHER; note = 2-fluoro-modified nucleoside
  modified_base 7: mod_base = OTHER; note = 2-fluoro-modified nucleoside
  modified_base 8: mod_base = OTHER; note = 2-fluoro-modified nucleoside
  modified_base 9: mod_base = OTHER; note = 2-fluoro-modified nucleoside
  modified_base 1: mod_base = OTHER; note = phosphorothioate linkage
  modified_base 19^20: mod_base = OTHER; note = phosphorothioate linkage
  modified_base 20^21: mod_base = OTHER; note = phosphorothioate linkage
  modified_base 11: mod_base = OTHER; note = 2-O-methyl modified nucleoside
  modified_base 15: mod_base = OTHER; note = 2-O-methyl modified nucleoside
  modified_base 19: mod_base = OTHER; note = 2-O-methyl modified nucleoside
  modified_base 20: mod_base = OTHER; note = 2-O-methyl modified nucleoside
  modified_base 4: mod_base = OTHER; note = 2-O-methyl modified nucleoside
  modified_base 2: mod_base = OTHER; note = 2-O-methyl modified nucleoside
atcgagaagtacatcccgatt

SEQ ID NO: 4516 - DNA, 21 bp, synthetic construct
  misc_feature 9: note = DNA
  misc_feature 1..8: note = RNA
  misc_feature 10..21: note = RNA
  source 1..21: mol_type = other DNA
  modified_base 19..21: mod_base = OTHER; note = phosphorothioate linkage
  modified_base 1..4: mod_base = OTHER; note = 2-O-methyl modified nucleoside
  modified_base 6: mod_base = OTHER; note = 2-O-methyl modified nucleoside
  modified_base 11..21: mod_base = OTHER; note = 2-O-methyl modified nucleoside
  modified_base 5: mod_base = OTHER; note = 2-fluoro-modified nucleoside
  modified_base 7..8: mod_base = OTHER; note = 2-fluoro-modified nucleoside
  modified_base 10: mod_base = OTHER; note = 2-fluoro-modified nucleoside
tcgagaagtacatcccgtatt

SEQ ID NO: 4517 - RNA, 21 nt, synthetic construct
  source 1..21: mol_type = other RNA; note = ETL17 GalNac Moiety
  modified_base 5: mod_base = OTHER; note = 2-fluoro-modified nucleoside
  modified_base 7: mod_base = OTHER; note = 2-fluoro-modified nucleoside
  modified_base 9: mod_base = OTHER; note = 2-fluoro-modified nucleoside
  modified_base 10: mod_base = OTHER; note = 2-fluoro-modified nucleoside
  modified_base 1: mod_base = OTHER; note = 2-O-methyl modified nucleoside; note = phosphorothioate linkage
  modified_base 19^20: mod_base = OTHER; note = phosphorothioate linkage
  modified_base 20^21: mod_base = OTHER; note = phosphorothioate linkage
  modified_base 20: mod_base = OTHER; note = 2-O-methyl modified nucleoside
  modified_base 16: mod_base = OTHER; note = 2-O-methyl modified nucleoside
  modified_base 2: mod_base = OTHER; note = 2-O-methyl modified nucleoside
  modified_base 4: mod_base = OTHER; note = 2-O-methyl modified nucleoside
gaagtacatcccgtacacatt

SEQ ID NO: 4518 - RNA, 21 nt, synthetic construct
  source 1..21: mol_type = other RNA; note = ETL17 GalNac Moiety
  modified_base 6: mod_base = OTHER; note = 2-fluoro-modified nucleoside
  modified_base 9: mod_base = OTHER; note = 2-fluoro-modified nucleoside
  modified_base 10: mod_base = OTHER; note = 2-fluoro-modified nucleoside
  modified_base 19^20: mod_base = OTHER; note = phosphorothioate linkage
  modified_base 20^21: mod_base = OTHER; note = phosphorothioate linkage
  modified_base 1: mod_base = OTHER; note = 2-O-methyl modified nucleoside; note = phosphorothioate linkage
  modified_base 2: mod_base = OTHER; note = 2-O-methyl modified nucleoside
  modified_base 19: mod_base = OTHER; note = 2-O-methyl modified nucleoside
  modified_base 20: mod_base = OTHER; note = 2-O-methyl modified nucleoside
  modified_base 21: mod_base = OTHER; note = 2-O-methyl modified nucleoside
  modified_base 15: mod_base = OTHER; note = 2-O-methyl modified nucleoside
  modified_base 17: mod_base = OTHER; note = 2-O-methyl modified nucleoside
tctgtgccggctacttcgatt

SEQ ID NO: 4519 - DNA, 21 bp, synthetic construct
  misc_feature 9: note = DNA
  misc_feature 1..8: note = RNA
  misc_feature 10..21: note = RNA
  source 1..21: mol_type = other DNA
  modified_base 19..21: mod_base = OTHER; note = phosphorothioate linkage
  modified_base 5: mod_base = OTHER; note = 2-fluoro-modified nucleoside
  modified_base 7..8: mod_base = OTHER; note = 2-fluoro-modified nucleoside
  modified_base 10: mod_base = OTHER; note = 2-fluoro-modified nucleoside
  modified_base 1..4: mod_base = OTHER; note = 2-O-methyl modified nucleoside
  modified_base 6: mod_base = OTHER; note = 2-O-methyl modified nucleoside
  modified_base 11..21: mod_base = OTHER; note = 2-O-methyl modified nucleoside
ctacttcgactgcaagtcatt

SEQ ID NO: 4520 - RNA, 21 nt, synthetic construct
  source 1..21: mol_type = other RNA; note = ETL17 GalNac Moiety
  modified_base 5: mod_base = OTHER; note = 2-fluoro-modified nucleoside
  modified_base 8: mod_base = OTHER; note = 2-fluoro-modified nucleoside
  modified_base 9: mod_base = OTHER; note = 2-fluoro-modified nucleoside
  modified_base 11: mod_base = OTHER; note = 2-fluoro-modified nucleoside
  modified_base 1: mod_base = OTHER; note = phosphorothioate linkage
  modified_base 19^20: mod_base = OTHER; note = phosphorothioate linkage
  modified_base 20^21: mod_base = OTHER; note = phosphorothioate linkage
  modified_base 2: mod_base = OTHER; note = 2-O-methyl modified nucleoside
  modified_base 19: mod_base = OTHER; note = 2-O-methyl modified nucleoside
  modified_base 20: mod_base = OTHER; note = 2-O-methyl modified nucleoside
  modified_base 15: mod_base = OTHER; note = 2-O-methyl modified nucleoside
  modified_base 19: mod_base = OTHER; note = 2-O-methyl modified nucleoside
acttcgactgcaagtccgatt

SEQ ID NO: 4521 - RNA, 21 nt, synthetic construct
  source 1..21: mol_type = other RNA; note = ETL17 GalNac Moiety
  modified_base 6: mod_base = OTHER; note = 2-fluoro-modified nucleoside
  modified_base 7: mod_base = OTHER; note = 2-fluoro-modified nucleoside
  modified_base 9: mod_base = OTHER; note = 2-fluoro-modified nucleoside
  modified_base 1: mod_base = OTHER; note = 2-O-methyl modified nucleoside; note = phosphorothioate linkage
  modified_base 19^20: mod_base = OTHER; note = phosphorothioate linkage
  modified_base 20^21: mod_base = OTHER; note = phosphorothioate linkage
  modified_base 2: mod_base = OTHER; note = 2-O-methyl modified nucleoside
  modified_base 3: mod_base = OTHER; note = 2-O-methyl modified nucleoside
  modified_base 12: mod_base = OTHER; note = 2-O-methyl modified nucleoside
  modified_base 19: mod_base = OTHER; note = 2-O-methyl modified nucleoside
  modified_base 20: mod_base = OTHER; note = 2-O-methyl modified nucleoside
  modified_base 21: mod_base = OTHER; note = 2-O-methyl modified nucleoside
ttcgactgcaagtccgacatt

SEQ ID NO: 4522 - DNA, 21 bp, synthetic construct
  misc_feature 9: note = DNA
  misc_feature 1..8: note = RNA
  misc_feature 10..21: note = RNA
  source 1..21: mol_type = other DNA
  modified_base 19..21: mod_base = OTHER; note = phosphorothioate linkage
  modified_base 1..4: mod_base = OTHER; note = 2-O-methyl modified nucleoside
  modified_base 6: mod_base = OTHER; note = 2-O-methyl modified nucleoside
  modified_base 11..21: mod_base = OTHER; note = 2-O-methyl modified nucleoside
  modified_base 5: mod_base = OTHER; note = 2-fluoro-modified nucleoside
  modified_base 7..8: mod_base = OTHER; note = 2-fluoro-modified nucleoside
  modified_base 10: mod_base = OTHER; note = 2-fluoro-modified nucleoside
ttacctctacggcatcatatt

SEQ ID NO: 4523 - RNA, 21 nt, synthetic construct
  source 1..21: mol_type = other RNA; note = ETL17 GalNac Moiety
  modified_base 6: mod_base = OTHER; note = 2-fluoro-modified nucleoside
  modified_base 7: mod_base = OTHER; note = 2-fluoro-modified nucleoside
  modified_base 9: mod_base = OTHER; note = 2-fluoro-modified nucleoside
  modified_base 1: mod_base = OTHER; note = 2-O-methyl modified nucleoside; note = phosphorothioate linkage
  modified_base 19^20: mod_base = OTHER; note = phosphorothioate linkage
  modified_base 20^21: mod_base = OTHER; note = phosphorothioate linkage
  modified_base 19: mod_base = OTHER; note = 2-O-methyl modified nucleoside
  modified_base 20: mod_base = OTHER; note = 2-O-methyl modified nucleoside
  modified_base 2: mod_base = OTHER; note = 2-O-methyl modified nucleoside
  modified_base 15: mod_base = OTHER; note = 2-O-methyl modified nucleoside
aacctaatgccacagcgaatt

SEQ ID NO: 4524 - DNA, 21 bp, synthetic construct
  misc_feature 9: note = DNA
  misc_feature 1..8: note = RNA
  misc_feature 10..21: note = RNA
  source 1..21: mol_type = other DNA
  modified_base 19..21: mod_base = OTHER; note = phosphorothioate linkage
  modified_base 1..21: mod_base = OTHER; note = 1..4, 6 and 11..21 are 2-O-methyl modified nucleoside ; 5, 7..8, 10 are 2-fluoro modified nucleoside
actatcctggtgacctctatt

SEQ ID NO: 4525 - RNA, 21 nt, synthetic construct
  source 1..21: mol_type = other RNA; note = ETL17 GalNac Moiety
  modified_base 6: mod_base = OTHER; note = 2-fluoro-modified nucleoside
  modified_base 8: mod_base = OTHER; note = 2-fluoro-modified nucleoside
  modified_base 9: mod_base = OTHER; note = 2-fluoro-modified nucleoside
  modified_base 11: mod_base = OTHER; note = 2-fluoro-modified nucleoside
  modified_base 1: mod_base = OTHER; note = phosphorothioate linkage; note = 2-O-methyl modified nucleoside
  modified_base 19^20: mod_base = OTHER; note = phosphorothioate linkage
  modified_base 20^21: mod_base = OTHER; note = phosphorothioate linkage
tggtgtgccacaactcacatt

SEQ ID NO: 4526 - RNA, 21 nt, synthetic construct
  source 1..21: mol_type = other RNA; note = ETL17 GalNac Moiety
  modified_base 7: mod_base = OTHER; note = 2-fluoro-modified nucleoside
  modified_base 9: mod_base = OTHER; note = 2-fluoro-modified nucleoside
  modified_base 10: mod_base = OTHER; note = 2-fluoro-modified nucleoside
  modified_base 1: mod_base = OTHER; note = phosphorothioate linkage; note = 2-O-methyl modified nucleoside
  modified_base 19^20: mod_base = OTHER; note = phosphorothioate linkage
  modified_base 20^21: mod_base = OTHER; note = phosphorothioate linkage
tgtgccacaactcacaacatt

SEQ ID NO: 4527 - RNA, 21 nt, synthetic construct
  source 1..21: mol_type = other RNA; note = ETL17 GalNac Moiety
  modified_base 5: mod_base = OTHER; note = 2-fluoro-modified nucleoside
  modified_base 6: mod_base = OTHER; note = 2-fluoro-modified nucleoside
  modified_base 9: mod_base = OTHER; note = 2-fluoro-modified nucleoside
  modified_base 1: mod_base = OTHER; note = phosphorothioate linkage; note = 2-O-methyl modified nucleoside
  modified_base 20^21: mod_base = OTHER; note = phosphorothioate linkage
  modified_base 19^20: mod_base = OTHER; note = phosphorothioate linkage
acaactcacaactacgacatt

SEQ ID NO: 4528 - RNA, 21 nt, synthetic construct
  source 1..21: mol_type = other RNA; note = ETL17 GalNac Moiety
  modified_base 6: mod_base = OTHER; note = 2-fluoro-modified nucleoside
  modified_base 8: mod_base = OTHER; note = 2-fluoro-modified nucleoside
  modified_base 9: mod_base = OTHER; note = 2-fluoro-modified nucleoside
  modified_base 1: mod_base = OTHER; note = 2-O-methyl modified nucleoside; note = phosphorothioate linkage
  modified_base 19^20: mod_base = OTHER; note = phosphorothioate linkage
  modified_base 20^21: mod_base = OTHER; note = phosphorothioate linkage
aactcacaactacgaccgatt

SEQ ID NO: 4529 - RNA, 21 nt, synthetic construct
  source 1..21: mol_type = other RNA; note = ETL17 GalNac Moiety
  modified_base 5: mod_base = OTHER; note = 2-fluoro-modified nucleoside
  modified_base 6: mod_base = OTHER; note = 2-fluoro-modified nucleoside
  modified_base 9: mod_base = OTHER; note = 2-fluoro-modified nucleoside
  modified_base 11: mod_base = OTHER; note = 2-fluoro-modified nucleoside
  modified_base 1: mod_base = OTHER; note = 2-O-methyl modified nucleoside; note = phosphorothioate linkage
  modified_base 19^20: mod_base = OTHER; note = phosphorothioate linkage
  modified_base 20^21: mod_base = OTHER; note = phosphorothioate linkage
tcacaactacgaccgggaatt

SEQ ID NO: 4530 - RNA, 21 nt, synthetic construct
  source 1..21: mol_type = other RNA; note = ETL17 GalNac Moiety
  modified_base 5: mod_base = OTHER; note = 2-fluoro-modified nucleoside
  modified_base 6: mod_base = OTHER; note = 2-fluoro-modified nucleoside
  modified_base 7: mod_base = OTHER; note = 2-fluoro-modified nucleoside
  modified_base 8: mod_base = OTHER; note = 2-fluoro-modified nucleoside
  modified_base 9: mod_base = OTHER; note = 2-fluoro-modified nucleoside
  modified_base 1: mod_base = OTHER; note = 2-O-methyl modified nucleoside; note = phosphorothioate linkage
  modified_base 19^20: mod_base = OTHER; note = phosphorothioate linkage
  modified_base 20^21: mod_base = OTHER; note = phosphorothioate linkage
  modified_base 19: mod_base = OTHER; note = 2-O-methyl modified nucleoside
  modified_base 2: mod_base = OTHER; note = 2-O-methyl modified nucleoside
  modified_base 3: mod_base = OTHER; note = 2-O-methyl modified nucleoside
  modified_base 15: mod_base = OTHER; note = 2-O-methyl modified nucleoside
  modified_base 21: mod_base = OTHER; note = 2-O-methyl modified nucleoside
agaagaggacgttcctgcatt

SEQ ID NO: 4531 - RNA, 21 nt, synthetic construct
  source 1..21: mol_type = other RNA; note = ETL17 GalNac Moiety
  modified_base 5: mod_base = OTHER; note = 2-fluoro-modified nucleoside
  modified_base 6: mod_base = OTHER; note = 2-fluoro-modified nucleoside
  modified_base 7: mod_base = OTHER; note = 2-fluoro-modified nucleoside
  modified_base 8: mod_base = OTHER; note = 2-fluoro-modified nucleoside
  modified_base 9: mod_base = OTHER; note = 2-fluoro-modified nucleoside
  modified_base 1: mod_base = OTHER; note = 2-O-methyl modified nucleoside; note = phosphorothioate linkage
  modified_base 19^20: mod_base = OTHER; note = phosphorothioate linkage
  modified_base 20^21: mod_base = OTHER; note = phosphorothioate linkage
  modified_base 19: mod_base = OTHER; note = 2-O-methyl modified nucleoside
  modified_base 20: mod_base = OTHER; note = 2-O-methyl modified nucleoside
  modified_base 21: mod_base = OTHER; note = 2-O-methyl modified nucleoside
  modified_base 2: mod_base = OTHER; note = 2-O-methyl modified nucleoside
  modified_base 3: mod_base = OTHER; note = 2-O-methyl modified nucleoside
  modified_base 11: mod_base = OTHER; note = 2-O-methyl modified nucleoside
  modified_base 14: mod_base = OTHER; note = 2-O-methyl modified nucleoside
  modified_base 16: mod_base = OTHER; note = 2-O-methyl modified nucleoside
agcacttcttcaaccgcaatt

SEQ ID NO: 4532 - RNA, 21 nt, synthetic construct
  source 1..21: mol_type = other RNA; note = ETL17 GalNac Moiety
  modified_base 5: mod_base = OTHER; note = 2-fluoro-modified nucleoside
  modified_base 6: mod_base = OTHER; note = 2-fluoro-modified nucleoside
  modified_base 7: mod_base = OTHER; note = 2-fluoro-modified nucleoside
  modified_base 8: mod_base = OTHER; note = 2-fluoro-modified nucleoside
  modified_base 9: mod_base = OTHER; note = 2-fluoro-modified nucleoside
  modified_base 1: mod_base = OTHER; note = 2-O-methyl modified nucleoside; note = phosphorothioate linkage
  modified_base 19^20: mod_base = OTHER; note = phosphorothioate linkage
  modified_base 20^21: mod_base = OTHER; note = phosphorothioate linkage
  modified_base 19: mod_base = OTHER; note = 2-O-methyl modified nucleoside
  modified_base 21: mod_base = OTHER; note = 2-O-methyl modified nucleoside
  modified_base 2: mod_base = OTHER; note = 2-O-methyl modified nucleoside
  modified_base 3: mod_base = OTHER; note = 2-O-methyl modified nucleoside
  modified_base 17: mod_base = OTHER; note = 2-O-methyl modified nucleoside
  modified_base 12: mod_base = OTHER; note = 2-O-methyl modified nucleoside
cacttcttcaaccgcacgatt

SEQ ID NO: 4533 - DNA, 21 bp, synthetic construct
  misc_feature 9: note = DNA
  misc_feature 1..8: note = RNA
  misc_feature 10..21: note = RNA
  source 1..21: mol_type = other DNA
  modified_base 19..21: mod_base = OTHER; note = phosphorothioate linkage
  modified_base 1..21: mod_base = OTHER; note = 1..4, 6 and 11..21 are 2-O-methyl modified nucleoside ; 5, 7..8, 10 are 2-fluoro modified nucleoside
acttcttcaaccgcacgaatt

SEQ ID NO: 4534 - DNA, 21 bp, synthetic construct
  misc_feature 9: note = DNA
  misc_feature 1..8: note = RNA
  misc_feature 10..21: note = RNA
  source 1..21: mol_type = other DNA
  modified_base 19..21: mod_base = OTHER; note = phosphorothioate linkage
  modified_base 1..21: mod_base = OTHER; note = 1..4, 6 and 11..21 are 2-O-methyl modified nucleoside ; 5, 7..8, 10 are 2-fluoro modified nucleoside
cttcttcaaccgcacgacatt

SEQ ID NO: 4535 - RNA, 21 nt, synthetic construct
  source 1..21: mol_type = other RNA; note = ETL17 GalNac Moiety
  modified_base 5: mod_base = OTHER; note = 2-fluoro-modified nucleoside
  modified_base 6: mod_base = OTHER; note = 2-fluoro-modified nucleoside
  modified_base 9: mod_base = OTHER; note = 2-fluoro-modified nucleoside
  modified_base 10: mod_base = OTHER; note = 2-fluoro-modified nucleoside
  modified_base 1: mod_base = OTHER; note = 2-O-methyl modified nucleoside; note = phosphorothioate linkage
  modified_base 19^20: mod_base = OTHER; note = phosphorothioate linkage
  modified_base 20^21: mod_base = OTHER; note = phosphorothioate linkage
  modified_base 2: mod_base = OTHER; note = 2-O-methyl modified nucleoside
  modified_base 3: mod_base = OTHER; note = 2-O-methyl modified nucleoside
  modified_base 4: mod_base = OTHER; note = 2-O-methyl modified nucleoside
  modified_base 19: mod_base = OTHER; note = 2-O-methyl modified nucleoside
  modified_base 20: mod_base = OTHER; note = 2-O-methyl modified nucleoside
  modified_base 21: mod_base = OTHER; note = 2-O-methyl modified nucleoside
ttcttcaaccgcacgacgatt

SEQ ID NO: 4536 - RNA, 21 nt, synthetic construct
  source 1..21: mol_type = other RNA; note = ETL17 GalNac Moiety
  modified_base 5: mod_base = OTHER; note = 2-fluoro-modified nucleoside
  modified_base 8: mod_base = OTHER; note = 2-fluoro-modified nucleoside
  modified_base 9: mod_base = OTHER; note = 2-fluoro-modified nucleoside
  modified_base 11: mod_base = OTHER; note = 2-fluoro-modified nucleoside
  modified_base 1: mod_base = OTHER; note = 2-O-methyl modified nucleoside; note = phosphorothioate linkage
  modified_base 19^20: mod_base = OTHER; note = phosphorothioate linkage
  modified_base 20^21: mod_base = OTHER; note = phosphorothioate linkage
  modified_base 2: mod_base = OTHER; note = 2-O-methyl modified nucleoside
  modified_base 3: mod_base = OTHER; note = 2-O-methyl modified nucleoside
  modified_base 4: mod_base = OTHER; note = 2-O-methyl modified nucleoside
  modified_base 12: mod_base = OTHER; note = 2-O-methyl modified nucleoside
  modified_base 16: mod_base = OTHER; note = 2-O-methyl modified nucleoside
tcttcaaccgcacgacggatt

SEQ ID NO: 4537 - RNA, 21 nt, synthetic construct
  source 1..21: mol_type = other RNA; note = ETL17 GalNac Moiety
  modified_base 6: mod_base = OTHER; note = 2-fluoro-modified nucleoside
  modified_base 8: mod_base = OTHER; note = 2-fluoro-modified nucleoside
  modified_base 9: mod_base = OTHER; note = 2-fluoro-modified nucleoside
  modified_base 1: mod_base = OTHER; note = phosphorothioate linkage; note = 2-O-methyl modified nucleoside
  modified_base 19^20: mod_base = OTHER; note = phosphorothioate linkage
  modified_base 20^21: mod_base = OTHER; note = phosphorothioate linkage
  modified_base 2: mod_base = OTHER; note = 2-O-methyl modified nucleoside
  modified_base 19: mod_base = OTHER; note = 2-O-methyl modified nucleoside
  modified_base 20: mod_base = OTHER; note = 2-O-methyl modified nucleoside
  modified_base 21: mod_base = OTHER; note = 2-O-methyl modified nucleoside
  modified_base 15: mod_base = OTHER; note = 2-O-methyl modified nucleoside
  modified_base 3: mod_base = OTHER; note = 2-O-methyl modified nucleoside
  modified_base 3: mod_base = OTHER; note = 2-O-methyl modified nucleoside
  modified_base 4: mod_base = OTHER; note = 2-O-methyl modified nucleoside
  modified_base 17: mod_base = OTHER; note = 2-O-methyl modified nucleoside
ttcggcatcgagaagtacatt

SEQ ID NO: 4538 - RNA, 21 nt, synthetic construct
  source 1..21: mol_type = other RNA; note = ETL17 GalNac Moiety
  modified_base 5: mod_base = OTHER; note = 2-fluoro-modified nucleoside
  modified_base 6: mod_base = OTHER; note = 2-fluoro-modified nucleoside
  modified_base 7: mod_base = OTHER; note = 2-fluoro-modified nucleoside
  modified_base 8: mod_base = OTHER; note = 2-fluoro-modified nucleoside
  modified_base 9: mod_base = OTHER; note = 2-fluoro-modified nucleoside
  modified_base 1: mod_base = OTHER; note = 2-O-methyl modified nucleoside; note = phosphorothioate linkage
  modified_base 19^20: mod_base = OTHER; note = phosphorothioate linkage
  modified_base 20^21: mod_base = OTHER; note = phosphorothioate linkage
  modified_base 19: mod_base = OTHER; note = 2-O-methyl modified nucleoside
  modified_base 21: mod_base = OTHER; note = 2-O-methyl modified nucleoside
  modified_base 2: mod_base = OTHER; note = 2-O-methyl modified nucleoside
  modified_base 3: mod_base = OTHER; note = 2-O-methyl modified nucleoside
  modified_base 4: mod_base = OTHER; note = 2-O-methyl modified nucleoside
atcgagaagtacatcccgatt

SEQ ID NO: 4539 - DNA, 21 bp, synthetic construct
  misc_feature 9: note = DNA
  misc_feature 1..8: note = RNA
  misc_feature 10..21: note = RNA
  source 1..21: mol_type = other DNA
  modified_base 19..21: mod_base = OTHER; note = phosphorothioate linkage
  modified_base 1..21: mod_base = OTHER; note = 1..4, 6 and 11..21 are 2-O-methyl modified nucleoside ; 5, 7..8, 10 are 2-fluoro modified nucleoside
tcgagaagtacatcccgtatt

SEQ ID NO: 4540 - RNA, 21 nt, synthetic construct
  source 1..21: mol_type = other RNA; note = ETL17 GalNac Moiety
  modified_base 6: mod_base = OTHER; note = 2-fluoro-modified nucleoside
  modified_base 9: mod_base = OTHER; note = 2-fluoro-modified nucleoside
  modified_base 10: mod_base = OTHER; note = 2-fluoro-modified nucleoside
  modified_base 1: mod_base = OTHER; note = phosphorothioate linkage
  modified_base 19^20: mod_base = OTHER; note = phosphorothioate linkage
  modified_base 20^21: mod_base = OTHER; note = phosphorothioate linkage
  modified_base 20: mod_base = OTHER; note = 2-O-methyl modified nucleoside
  modified_base 19: mod_base = OTHER; note = 2-O-methyl modified nucleoside
  modified_base 2: mod_base = OTHER; note = 2-O-methyl modified nucleoside
  modified_base 15: mod_base = OTHER; note = 2-O-methyl modified nucleoside
  modified_base 16: mod_base = OTHER; note = 2-O-methyl modified nucleoside
  modified_base 3: mod_base = OTHER; note = 2-O-methyl modified nucleoside
  modified_base 4: mod_base = OTHER; note = 2-O-methyl modified nucleoside
  modified_base 11: mod_base = OTHER; note = 2-O-methyl modified nucleoside
gaagtacatcccgtacacatt

SEQ ID NO: 4541 - RNA, 21 nt, synthetic construct
  source 1..21: mol_type = other RNA; note = ETL17 GalNac Moiety
  modified_base 6: mod_base = OTHER; note = 2-fluoro-modified nucleoside
  modified_base 8: mod_base = OTHER; note = 2-fluoro-modified nucleoside
  modified_base 9: mod_base = OTHER; note = 2-fluoro-modified nucleoside
  modified_base 1: mod_base = OTHER; note = phosphorothioate linkage; note = 2-O-methyl modified nucleoside
  modified_base 19^20: mod_base = OTHER; note = phosphorothioate linkage
  modified_base 20^21: mod_base = OTHER; note = phosphorothioate linkage
  modified_base 19: mod_base = OTHER; note = 2-O-methyl modified nucleoside
  modified_base 2: mod_base = OTHER; note = 2-O-methyl modified nucleoside
  modified_base 3: mod_base = OTHER; note = 2-O-methyl modified nucleoside
  modified_base 20: mod_base = OTHER; note = 2-O-methyl modified nucleoside
  modified_base 21: mod_base = OTHER; note = 2-O-methyl modified nucleoside
tctgtgccggctacttcgatt

SEQ ID NO: 4542 - DNA, 21 bp, synthetic construct
  misc_feature 9: note = DNA
  misc_feature 1..8: note = RNA
  misc_feature 10..21: note = RNA
  source 1..21: mol_type = other DNA
  modified_base 19..21: mod_base = OTHER; note = phosphorothioate linkage
  modified_base 1..21: mod_base = OTHER; note = 1..4, 6 and 11..21 are 2-O-methyl modified nucleoside ; 5, 7..8, 10 are 2-fluoro modified nucleoside
ctacttcgactgcaagtcatt

SEQ ID NO: 4543 - RNA, 21 nt, synthetic construct
  source 1..21: mol_type = other RNA; note = ETL17 GalNac Moiety
  modified_base 5: mod_base = OTHER; note = 2-fluoro-modified nucleoside
  modified_base 8: mod_base = OTHER; note = 2-fluoro-modified nucleoside
  modified_base 9: mod_base = OTHER; note = 2-fluoro-modified nucleoside
  modified_base 11: mod_base = OTHER; note = 2-fluoro-modified nucleoside
  modified_base 19^20: mod_base = OTHER; note = phosphorothioate linkage
  modified_base 20^21: mod_base = OTHER; note = phosphorothioate linkage
  modified_base 1: mod_base = OTHER; note = 2-O-methyl modified nucleoside; note = phosphorothioate linkage
acttcgactgcaagtccgatt

SEQ ID NO: 4544 - RNA, 21 nt, synthetic construct
  source 1..21: mol_type = other RNA; note = ETL17 GalNac Moiety
  modified_base 6: mod_base = OTHER; note = 2-fluoro-modified nucleoside
  modified_base 7: mod_base = OTHER; note = 2-fluoro-modified nucleoside
  modified_base 9: mod_base = OTHER; note = 2-fluoro-modified nucleoside
  modified_base 1: mod_base = OTHER; note = phosphorothioate linkage; note = 2-O-methyl modified nucleoside
  modified_base 19^20: mod_base = OTHER; note = phosphorothioate linkage
  modified_base 20^21: mod_base = OTHER; note = phosphorothioate linkage
ttcgactgcaagtccgacatt

SEQ ID NO: 4545 - DNA, 21 bp, synthetic construct
  misc_feature 9: note = DNA
  misc_feature 1..8: note = RNA
  misc_feature 10..21: note = RNA
  source 1..21: mol_type = other DNA
  modified_base 19..21: mod_base = OTHER; note = phosphorothioate linkage
  modified_base 1..21: mod_base = OTHER; note = 1..4, 6 and 11..21 are 2-O-methyl modified nucleoside ; 5, 7..8, 10 are 2-fluoro modified nucleoside
ttacctctacggcatcatatt

SEQ ID NO: 4546 - RNA, 21 nt, synthetic construct
  source 1..21: mol_type = other RNA; note = ETL17 GalNac Moiety
  modified_base 5: mod_base = OTHER; note = 2-fluoro-modified nucleoside
  modified_base 7: mod_base = OTHER; note = 2-fluoro-modified nucleoside
  modified_base 8: mod_base = OTHER; note = 2-fluoro-modified nucleoside
  modified_base 9: mod_base = OTHER; note = 2-fluoro-modified nucleoside
  modified_base 10: mod_base = OTHER; note = 2-fluoro-modified nucleoside
  modified_base 1: mod_base = OTHER; note = phosphorothioate linkage; note = 2-O-methyl modified nucleoside
  modified_base 19^20: mod_base = OTHER; note = phosphorothioate linkage
  modified_base 20^21: mod_base = OTHER; note = phosphorothioate linkage
cggcacagagaaatgcttatt

SEQ ID NO: 4547 - RNA, 21 nt, synthetic construct
  source 1..21: mol_type = other RNA; note = ETL17 GalNac Moiety
  modified_base 6: mod_base = OTHER; note = 2-fluoro-modified nucleoside
  modified_base 7: mod_base = OTHER; note = 2-fluoro-modified nucleoside
  modified_base 8: mod_base = OTHER; note = 2-fluoro-modified nucleoside
  modified_base 9: mod_base = OTHER; note = 2-fluoro-modified nucleoside
  modified_base 10: mod_base = OTHER; note = 2-fluoro-modified nucleoside
  modified_base 1: mod_base = OTHER; note = phosphorothioate linkage; note = 2-O-methyl modified nucleoside
  modified_base 19^20: mod_base = OTHER; note = phosphorothioate linkage
  modified_base 20^21: mod_base = OTHER; note = phosphorothioate linkage
ggcacagagaaatgctttatt

SEQ ID NO: 4548 - RNA, 21 nt, synthetic construct
  source 1..21: mol_type = other RNA; note = ETL17 GalNac Moiety
  modified_base 5: mod_base = OTHER; note = 2-fluoro-modified nucleoside
  modified_base 6: mod_base = OTHER; note = 2-fluoro-modified nucleoside
  modified_base 7: mod_base = OTHER; note = 2-fluoro-modified nucleoside
  modified_base 8: mod_base = OTHER; note = 2-fluoro-modified nucleoside
  modified_base 9: mod_base = OTHER; note = 2-fluoro-modified nucleoside
  modified_base 1: mod_base = OTHER; note = phosphorothioate linkage; note = 2-O-methyl modified nucleoside
  modified_base 19^20: mod_base = OTHER; note = phosphorothioate linkage
  modified_base 20^21: mod_base = OTHER; note = phosphorothioate linkage
  modified_base 19: mod_base = OTHER; note = 2-O-methyl modified nucleoside
  modified_base 16: mod_base = OTHER; note = 2-O-methyl modified nucleoside
gcacagagaaatgctttgatt

SEQ ID NO: 4549 - RNA, 21 nt, synthetic construct
  source 1..21: mol_type = other RNA; note = ETL17 GalNac Moiety
  modified_base 5: mod_base = OTHER; note = 2-fluoro-modified nucleoside
  modified_base 6: mod_base = OTHER; note = 2-fluoro-modified nucleoside
  modified_base 7: mod_base = OTHER; note = 2-fluoro-modified nucleoside
  modified_base 8: mod_base = OTHER; note = 2-fluoro-modified nucleoside
  modified_base 9: mod_base = OTHER; note = 2-fluoro-modified nucleoside
  modified_base 1: mod_base = OTHER; note = 2-O-methyl modified nucleoside; note = phosphorothioate linkage
  modified_base 19^20: mod_base = OTHER; note = phosphorothioate linkage
  modified_base 20^21: mod_base = OTHER; note = phosphorothioate linkage
  modified_base 19: mod_base = OTHER; note = 2-O-methyl modified nucleoside
  modified_base 2: mod_base = OTHER; note = 2-O-methyl modified nucleoside
  modified_base 3: mod_base = OTHER; note = 2-O-methyl modified nucleoside
  modified_base 20: mod_base = OTHER; note = 2-O-methyl modified nucleoside
cacagagaaatgctttgaatt

SEQ ID NO: 4550 - RNA, 21 nt, synthetic construct
  source 1..21: mol_type = other RNA; note = ETL17 GalNac Moiety
  modified_base 5: mod_base = OTHER; note = 2-fluoro-modified nucleoside
  modified_base 6: mod_base = OTHER; note = 2-fluoro-modified nucleoside
  modified_base 7: mod_base = OTHER; note = 2-fluoro-modified nucleoside
  modified_base 8: mod_base = OTHER; note = 2-fluoro-modified nucleoside
  modified_base 9: mod_base = OTHER; note = 2-fluoro-modified nucleoside
  modified_base 1: mod_base = OTHER; note = 2-O-methyl modified nucleoside; note = phosphorothioate linkage
  modified_base 19^20: mod_base = OTHER; note = phosphorothioate linkage
  modified_base 20^21: mod_base = OTHER; note = phosphorothioate linkage
  modified_base 19: mod_base = OTHER; note = 2-O-methyl modified nucleoside
  modified_base 2: mod_base = OTHER; note = 2-O-methyl modified nucleoside
acagagaaatgctttgatatt

SEQ ID NO: 4551 - DNA, 21 bp, synthetic construct
  misc_feature 9: note = DNA
  misc_feature 1..8: note = RNA
  misc_feature 10..21: note = RNA
  source 1..21: mol_type = other DNA
  modified_base 19..21: mod_base = OTHER; note = phosphorothioate linkage
  modified_base 1..21: mod_base = OTHER; note = 1..4, 6 and 11..21 are 2-O-methyl modified nucleoside ; 5, 7..8, 10 are 2-fluoro modified nucleoside
cagagaaatgctttgatgatt

SEQ ID NO: 4552 - RNA, 21 nt, synthetic construct
  source 1..21: mol_type = other RNA; note = ETL17 GalNac Moiety
  modified_base 5: mod_base = OTHER; note = 2-fluoro-modified nucleoside
  modified_base 6: mod_base = OTHER; note = 2-fluoro-modified nucleoside
  modified_base 9: mod_base = OTHER; note = 2-fluoro-modified nucleoside
  modified_base 1: mod_base = OTHER; note = 2-O-methyl modified nucleoside; note = phosphorothioate linkage
  modified_base 19^20: mod_base = OTHER; note = phosphorothioate linkage
  modified_base 20^21: mod_base = OTHER; note = phosphorothioate linkage
agagaaatgctttgatgaatt

SEQ ID NO: 4553 - RNA, 21 nt, synthetic construct
  source 1..21: mol_type = other RNA; note = ETL17 GalNac Moiety
  modified_base 5: mod_base = OTHER; note = 2-fluoro-modified nucleoside
  modified_base 7: mod_base = OTHER; note = 2-fluoro-modified nucleoside
  modified_base 8: mod_base = OTHER; note = 2-fluoro-modified nucleoside
  modified_base 9: mod_base = OTHER; note = 2-fluoro-modified nucleoside
  modified_base 10: mod_base = OTHER; note = 2-fluoro-modified nucleoside
  modified_base 1: mod_base = OTHER; note = phosphorothioate linkage; note = 2-O-methyl modified nucleoside
  modified_base 19^20: mod_base = OTHER; note = phosphorothioate linkage
  modified_base 20^21: mod_base = OTHER; note = phosphorothioate linkage
gaaatgctttgatgagacatt

SEQ ID NO: 4554 - RNA, 21 nt, synthetic construct
  source 1..21: mol_type = other RNA; note = ETL17 GalNac Moiety
  modified_base 6: mod_base = OTHER; note = 2-fluoro-modified nucleoside
  modified_base 9: mod_base = OTHER; note = 2-fluoro-modified nucleoside
  modified_base 10: mod_base = OTHER; note = 2-fluoro-modified nucleoside
  modified_base 1: mod_base = OTHER; note = 2-O-methyl modified nucleoside; note = phosphorothioate linkage
  modified_base 19^20: mod_base = OTHER; note = phosphorothioate linkage
  modified_base 20^21: mod_base = OTHER; note = phosphorothioate linkage
acatacagcttgtctgagatt

SEQ ID NO: 4555 - RNA, 21 nt, synthetic construct
  source 1..21: mol_type = other RNA; note = ETL17 GalNac Moiety
  modified_base 5: mod_base = OTHER; note = 2-fluoro-modified nucleoside
  modified_base 9: mod_base = OTHER; note = 2-fluoro-modified nucleoside
  modified_base 6: mod_base = OTHER; note = 2-fluoro-modified nucleoside
  modified_base 10: mod_base = OTHER; note = 2-fluoro-modified nucleoside
  modified_base 1: mod_base = OTHER; note = 2-O-methyl modified nucleoside; note = phosphorothioate linkage
  modified_base 19^20: mod_base = OTHER; note = phosphorothioate linkage
  modified_base 20^21: mod_base = OTHER; note = phosphorothioate linkage
tgatccggctgaagaagaatt

SEQ ID NO: 4556 - RNA, 21 nt, synthetic construct
  source 1..21: mol_type = other RNA; note = ETL17 GalNac Moiety
  modified_base 5: mod_base = OTHER; note = 2-fluoro-modified nucleoside
  modified_base 8: mod_base = OTHER; note = 2-fluoro-modified nucleoside
  modified_base 9: mod_base = OTHER; note = 2-fluoro-modified nucleoside
  modified_base 1: mod_base = OTHER; note = phosphorothioate linkage; note = 2-O-methyl modified nucleoside
  modified_base 19^20: mod_base = OTHER; note = phosphorothioate linkage
  modified_base 20^21: mod_base = OTHER; note = phosphorothioate linkage
gatccggctgaagaagaaatt

SEQ ID NO: 4557 - RNA, 21 nt, synthetic construct
  source 1..21: mol_type = other RNA; note = ETL17 GalNac Moiety
  modified_base 6: mod_base = OTHER; note = 2-fluoro-modified nucleoside
  modified_base 8: mod_base = OTHER; note = 2-fluoro-modified nucleoside
  modified_base 9: mod_base = OTHER; note = 2-fluoro-modified nucleoside
  modified_base 1: mod_base = OTHER; note = phosphorothioate linkage; note = 2-O-methyl modified nucleoside
  modified_base 19^20: mod_base = OTHER; note = phosphorothioate linkage
  modified_base 20^21: mod_base = OTHER; note = phosphorothioate linkage
  modified_base 19: mod_base = OTHER; note = 2-O-methyl modified nucleoside
  modified_base 2: mod_base = OTHER; note = 2-O-methyl modified nucleoside
  modified_base 15: mod_base = OTHER; note = 2-O-methyl modified nucleoside
  modified_base 12: mod_base = OTHER; note = 2-O-methyl modified nucleoside
aggacacaagtgccagatatt

SEQ ID NO: 4558 - RNA, 21 nt, synthetic construct
  source 1..21: mol_type = other RNA; note = ETL17 GalNac Moiety
  modified_base 7: mod_base = OTHER; note = 2-fluoro-modified nucleoside
  modified_base 9: mod_base = OTHER; note = 2-fluoro-modified nucleoside
  modified_base 11: mod_base = OTHER; note = 2-fluoro-modified nucleoside
  modified_base 1: mod_base = OTHER; note = 2-O-methyl modified nucleoside; note = phosphorothioate linkage
  modified_base 19^20: mod_base = OTHER; note = phosphorothioate linkage
  modified_base 20^21: mod_base = OTHER; note = phosphorothioate linkage
  modified_base 2: mod_base = OTHER; note = 2-O-methyl modified nucleoside
  modified_base 3: mod_base = OTHER; note = 2-O-methyl modified nucleoside
  modified_base 18: mod_base = OTHER; note = 2-O-methyl modified nucleoside
  modified_base 20: mod_base = OTHER; note = 2-O-methyl modified nucleoside
  modified_base 21: mod_base = OTHER; note = 2-O-methyl modified nucleoside
ccaactatgtggactggaatt

SEQ ID NO: 4559 - RNA, 21 nt, synthetic construct
  source 1..21: mol_type = other RNA; note = ETL17 GalNac Moiety
  modified_base 5: mod_base = OTHER; note = 2-fluoro-modified nucleoside
  modified_base 7: mod_base = OTHER; note = 2-fluoro-modified nucleoside
  modified_base 9: mod_base = OTHER; note = 2-fluoro-modified nucleoside
  modified_base 1: mod_base = OTHER; note = 2-O-methyl modified nucleoside; note = phosphorothioate linkage
  modified_base 19^20: mod_base = OTHER; note = phosphorothioate linkage
  modified_base 20^21: mod_base = OTHER; note = phosphorothioate linkage
  modified_base 2: mod_base = OTHER; note = 2-O-methyl modified nucleoside
  modified_base 3: mod_base = OTHER; note = 2-O-methyl modified nucleoside
  modified_base 19: mod_base = OTHER; note = 2-O-methyl modified nucleoside
  modified_base 20: mod_base = OTHER; note = 2-O-methyl modified nucleoside
  modified_base 21: mod_base = OTHER; note = 2-O-methyl modified nucleoside
caactatgtggactggatatt

SEQ ID NO: 4560 - RNA, 21 nt, synthetic construct
  source 1..21: mol_type = other RNA; note = ETL17 GalNac Moiety
  modified_base 5: mod_base = OTHER; note = 2-fluoro-modified nucleoside
  modified_base 7: mod_base = OTHER; note = 2-fluoro-modified nucleoside
  modified_base 9: mod_base = OTHER; note = 2-fluoro-modified nucleoside
  modified_base 1: mod_base = OTHER; note = 2-O-methyl modified nucleoside; note = phosphorothioate linkage
  modified_base 19^20: mod_base = OTHER; note = phosphorothioate linkage
  modified_base 20^21: mod_base = OTHER; note = phosphorothioate linkage
  modified_base 20: mod_base = OTHER; note = 2-O-methyl modified nucleoside
ctatgtggactggatcaaatt

SEQ ID NO: 4561 - RNA, 21 nt, synthetic construct
  source 1..21: mol_type = other RNA; note = ETL17 GalNac Moiety
  modified_base 5: mod_base = OTHER; note = 2-fluoro-modified nucleoside
  modified_base 9: mod_base = OTHER; note = 2-fluoro-modified nucleoside
  modified_base 10: mod_base = OTHER; note = 2-fluoro-modified nucleoside
  modified_base 1: mod_base = OTHER; note = 2-O-methyl modified nucleoside; note = phosphorothioate linkage
  modified_base 19^20: mod_base = OTHER; note = phosphorothioate linkage
  modified_base 20^21: mod_base = OTHER; note = phosphorothioate linkage
  modified_base 2: mod_base = OTHER; note = 2-O-methyl modified nucleoside
  modified_base 3: mod_base = OTHER; note = 2-O-methyl modified nucleoside
  modified_base 4: mod_base = OTHER; note = 2-O-methyl modified nucleoside
  modified_base 20: mod_base = OTHER; note = 2-O-methyl modified nucleoside
  modified_base 21: mod_base = OTHER; note = 2-O-methyl modified nucleoside
tatgtggactggatcaacatt

SEQ ID NO: 4562 - RNA, 21 nt, synthetic construct
  source 1..21: mol_type = other RNA
aacctaatgccacagcgaatt

SEQ ID NO: 4563 - RNA, 21 nt, synthetic construct
  source 1..21: mol_type = other RNA
actatcctggtgacctctatt

SEQ ID NO: 4564 - RNA, 21 nt, synthetic construct
  source 1..21: mol_type = other RNA
tggtgtgccacaactcacatt

SEQ ID NO: 4565 - RNA, 21 nt, synthetic construct
  source 1..21: mol_type = other RNA
tgtgccacaactcacaacatt

SEQ ID NO: 4566 - RNA, 21 nt, synthetic construct
  source 1..21: mol_type = other RNA
acaactcacaactacgacatt

SEQ ID NO: 4567 - RNA, 21 nt, synthetic construct
  source 1..21: mol_type = other RNA
aactcacaactacgaccgatt

SEQ ID NO: 4568 - RNA, 21 nt, synthetic construct
  source 1..21: mol_type = other RNA
tcacaactacgaccgggaatt

SEQ ID NO: 4569 - RNA, 21 nt, synthetic construct
  source 1..21: mol_type = other RNA
agaagaggacgttcctgcatt

SEQ ID NO: 4570 - RNA, 21 nt, synthetic construct
  source 1..21: mol_type = other RNA
agcacttcttcaaccgcaatt

SEQ ID NO: 4571 - RNA, 21 nt, synthetic construct
  source 1..21: mol_type = other RNA
cacttcttcaaccgcacgatt

SEQ ID NO: 4572 - RNA, 21 nt, synthetic construct
  source 1..21: mol_type = other RNA
acttcttcaaccgcacgaatt

SEQ ID NO: 4573 - RNA, 21 nt, synthetic construct
  source 1..21: mol_type = other RNA
cttcttcaaccgcacgacatt

SEQ ID NO: 4574 - RNA, 21 nt, synthetic construct
  source 1..21: mol_type = other RNA
ttcttcaaccgcacgacgatt

SEQ ID NO: 4575 - RNA, 21 nt, synthetic construct
  source 1..21: mol_type = other RNA
tcttcaaccgcacgacggatt

SEQ ID NO: 4576 - RNA, 21 nt, synthetic construct
  source 1..21: mol_type = other RNA
ttcggcatcgagaagtacatt

SEQ ID NO: 4577 - RNA, 21 nt, synthetic construct
  source 1..21: mol_type = other RNA
atcgagaagtacatcccgatt

SEQ ID NO: 4578 - RNA, 21 nt, synthetic construct
  source 1..21: mol_type = other RNA
tcgagaagtacatcccgtatt

SEQ ID NO: 4579 - RNA, 21 nt, synthetic construct
  source 1..21: mol_type = other RNA
gaagtacatcccgtacacatt

SEQ ID NO: 4580 - RNA, 21 nt, synthetic construct
  source 1..21: mol_type = other RNA
tctgtgccggctacttcgatt

SEQ ID NO: 4581 - RNA, 21 nt, synthetic construct
  source 1..21: mol_type = other RNA
ctacttcgactgcaagtcatt

SEQ ID NO: 4582 - RNA, 21 nt, synthetic construct
  source 1..21: mol_type = other RNA
acttcgactgcaagtccgatt

SEQ ID NO: 4583 - RNA, 21 nt, synthetic construct
  source 1..21: mol_type = other RNA
ttcgactgcaagtccgacatt

SEQ ID NO: 4584 - RNA, 21 nt, synthetic construct
  source 1..21: mol_type = other RNA
ttacctctacggcatcatatt

SEQ ID NO: 4585 - RNA, 21 nt, synthetic construct
  source 1..21: mol_type = other RNA
cggcacagagaaatgcttatt

SEQ ID NO: 4586 - RNA, 21 nt, synthetic construct
  source 1..21: mol_type = other RNA
ggcacagagaaatgctttatt

SEQ ID NO: 4587 - RNA, 21 nt, synthetic construct
  source 1..21: mol_type = other RNA
gcacagagaaatgctttgatt

SEQ ID NO: 4588 - RNA, 21 nt, synthetic construct
  source 1..21: mol_type = other RNA
cacagagaaatgctttgaatt

SEQ ID NO: 4589 - RNA, 21 nt, synthetic construct
  source 1..21: mol_type = other RNA
acagagaaatgctttgatatt

SEQ ID NO: 4590 - RNA, 21 nt, synthetic construct
  source 1..21: mol_type = other RNA
cagagaaatgctttgatgatt

SEQ ID NO: 4591 - RNA, 21 nt, synthetic construct
  source 1..21: mol_type = other RNA
agagaaatgctttgatgaatt

SEQ ID NO: 4592 - RNA, 21 nt, synthetic construct
  source 1..21: mol_type = other RNA
gaaatgctttgatgagacatt

SEQ ID NO: 4593 - RNA, 21 nt, synthetic construct
  source 1..21: mol_type = other RNA
acatacagcttgtctgagatt

SEQ ID NO: 4594 - RNA, 21 nt, synthetic construct
  source 1..21: mol_type = other RNA
tgatccggctgaagaagaatt

SEQ ID NO: 4595 - RNA, 21 nt, synthetic construct
  source 1..21: mol_type = other RNA
gatccggctgaagaagaaatt

SEQ ID NO: 4596 - RNA, 21 nt, synthetic construct
  source 1..21: mol_type = other RNA
aggacacaagtgccagatatt

SEQ ID NO: 4597 - RNA, 21 nt, synthetic construct
  source 1..21: mol_type = other RNA
ccaactatgtggactggaatt

SEQ ID NO: 4598 - RNA, 21 nt, synthetic construct
  source 1..21: mol_type = other RNA
caactatgtggactggatatt

SEQ ID NO: 4599 - RNA, 21 nt, synthetic construct
  source 1..21: mol_type = other RNA
ctatgtggactggatcaaatt

SEQ ID NO: 4600 - RNA, 21 nt, synthetic construct
  source 1..21: mol_type = other RNA
tatgtggactggatcaacatt

SEQ ID NO: 4601 - RNA, 19 nt, synthetic construct
  source 1..19: mol_type = other RNA
cggcacagagaaatgctta

SEQ ID NO: 4602 - RNA, 19 nt, synthetic construct
  source 1..19: mol_type = other RNA
ggcacagagaaatgcttta

SEQ ID NO: 4603 - RNA, 19 nt, synthetic construct
  source 1..19: mol_type = other RNA
gcacagagaaatgctttga

SEQ ID NO: 4604 - RNA, 19 nt, synthetic construct
  source 1..19: mol_type = other RNA
cacagagaaatgctttgaa

SEQ ID NO: 4605 - RNA, 19 nt, synthetic construct
  source 1..19: mol_type = other RNA
acagagaaatgctttgata

SEQ ID NO: 4606 - RNA, 19 nt, synthetic construct
  source 1..19: mol_type = other RNA
cagagaaatgctttgatga

SEQ ID NO: 4607 - RNA, 19 nt, synthetic construct
  source 1..19: mol_type = other RNA
agagaaatgctttgatgaa

SEQ ID NO: 4608 - RNA, 19 nt, synthetic construct
  source 1..19: mol_type = other RNA
gaaatgctttgatgagaca

SEQ ID NO: 4609 - RNA, 19 nt, synthetic construct
  source 1..19: mol_type = other RNA
acatacagcttgtctgaga

SEQ ID NO: 4610 - RNA, 19 nt, synthetic construct
  source 1..19: mol_type = other RNA
tgatccggctgaagaagaa

SEQ ID NO: 4611 - RNA, 19 nt, synthetic construct
  source 1..19: mol_type = other RNA
gatccggctgaagaagaaa

SEQ ID NO: 4612 - RNA, 19 nt, synthetic construct
  source 1..19: mol_type = other RNA
aggacacaagtgccagata

SEQ ID NO: 4613 - RNA, 19 nt, synthetic construct
  source 1..19: mol_type = other RNA
ccaactatgtggactggaa

SEQ ID NO: 4614 - RNA, 19 nt, synthetic construct
  source 1..19: mol_type = other RNA
caactatgtggactggata

SEQ ID NO: 4615 - RNA, 19 nt, synthetic construct
  source 1..19: mol_type = other RNA
ctatgtggactggatcaaa

SEQ ID NO: 4616 - RNA, 19 nt, synthetic construct
  source 1..19: mol_type = other RNA
tatgtggactggatcaaca

SEQ ID NO: 4617 - RNA, 21 nt, synthetic construct
  source 1..21: mol_type = other RNA
ttcgctgtggcattaggtttt

SEQ ID NO: 4618 - RNA, 21 nt, synthetic construct
  source 1..21: mol_type = other RNA
tagaggtcaccaggatagttt

SEQ ID NO: 4619 - RNA, 21 nt, synthetic construct
  source 1..21: mol_type = other RNA
tgtgagttgtggcacaccatt

SEQ ID NO: 4620 - RNA, 21 nt, synthetic construct
  source 1..21: mol_type = other RNA
tgttgtgagttgtggcacatt

SEQ ID NO: 4621 - RNA, 21 nt, synthetic construct
  source 1..21: mol_type = other RNA
tgtcgtagttgtgagttgttt

SEQ ID NO: 4622 - RNA, 21 nt, synthetic construct
  source 1..21: mol_type = other RNA
tcggtcgtagttgtgagtttt

SEQ ID NO: 4623 - RNA, 21 nt, synthetic construct
  source 1..21: mol_type = other RNA
ttcccggtcgtagttgtgatt

SEQ ID NO: 4624 - RNA, 21 nt, synthetic construct
  source 1..21: mol_type = other RNA
tgcaggaacgtcctcttcttt

SEQ ID NO: 4625 - RNA, 21 nt, synthetic construct
  source 1..21: mol_type = other RNA
ttgcggttgaagaagtgcttt

SEQ ID NO: 4626 - RNA, 21 nt, synthetic construct
  source 1..21: mol_type = other RNA
tcgtgcggttgaagaagtgtt

SEQ ID NO: 4627 - RNA, 21 nt, synthetic construct
  source 1..21: mol_type = other RNA
ttcgtgcggttgaagaagttt

SEQ ID NO: 4628 - RNA, 21 nt, synthetic construct
  source 1..21: mol_type = other RNA
tgtcgtgcggttgaagaagtt

SEQ ID NO: 4629 - RNA, 21 nt, synthetic construct
  source 1..21: mol_type = other RNA
tcgtcgtgcggttgaagaatt

SEQ ID NO: 4630 - RNA, 21 nt, synthetic construct
  source 1..21: mol_type = other RNA
tccgtcgtgcggttgaagatt

SEQ ID NO: 4631 - RNA, 21 nt, synthetic construct
  source 1..21: mol_type = other RNA
tgtacttctcgatgccgaatt

SEQ ID NO: 4632 - RNA, 21 nt, synthetic construct
  source 1..21: mol_type = other RNA
tcgggatgtacttctcgattt

SEQ ID NO: 4633 - RNA, 21 nt, synthetic construct
  source 1..21: mol_type = other RNA
tacgggatgtacttctcgatt

SEQ ID NO: 4634 - RNA, 21 nt, synthetic construct
  source 1..21: mol_type = other RNA
tgtgtacgggatgtacttctt

SEQ ID NO: 4635 - RNA, 21 nt, synthetic construct
  source 1..21: mol_type = other RNA
tcgaagtagccggcacagatt

SEQ ID NO: 4636 - RNA, 21 nt, synthetic construct
  source 1..21: mol_type = other RNA
tgacttgcagtcgaagtagtt

SEQ ID NO: 4637 - RNA, 21 nt, synthetic construct
  source 1..21: mol_type = other RNA
tcggacttgcagtcgaagttt

SEQ ID NO: 4638 - RNA, 21 nt, synthetic construct
  source 1..21: mol_type = other RNA
tgtcggacttgcagtcgaatt

SEQ ID NO: 4639 - RNA, 21 nt, synthetic construct
  source 1..21: mol_type = other RNA
tatgatgccgtagaggtaatt

SEQ ID NO: 4640 - RNA, 21 nt, synthetic construct
  source 1..21: mol_type = other RNA
taagcatttctctgtgccgtt

SEQ ID NO: 4641 - RNA, 21 nt, synthetic construct
  source 1..21: mol_type = other RNA
taaagcatttctctgtgcctt

SEQ ID NO: 4642 - RNA, 21 nt, synthetic construct
  source 1..21: mol_type = other RNA
tcaaagcatttctctgtgctt

SEQ ID NO: 4643 - RNA, 21 nt, synthetic construct
  source 1..21: mol_type = other RNA
ttcaaagcatttctctgtgtt

SEQ ID NO: 4644 - RNA, 21 nt, synthetic construct
  source 1..21: mol_type = other RNA
tatcaaagcatttctctgttt

SEQ ID NO: 4645 - RNA, 21 nt, synthetic construct
  source 1..21: mol_type = other RNA
tcatcaaagcatttctctgtt

SEQ ID NO: 4646 - RNA, 21 nt, synthetic construct
  source 1..21: mol_type = other RNA
ttcatcaaagcatttctcttt

SEQ ID NO: 4647 - RNA, 21 nt, synthetic construct
  source 1..21: mol_type = other RNA
tgtctcatcaaagcatttctt

SEQ ID NO: 4648 - RNA, 21 nt, synthetic construct
  source 1..21: mol_type = other RNA
tctcagacaagctgtatgttt

SEQ ID NO: 4649 - RNA, 21 nt, synthetic construct
  source 1..21: mol_type = other RNA
ttcttcttcagccggatcatt

SEQ ID NO: 4650 - RNA, 21 nt, synthetic construct
  source 1..21: mol_type = other RNA
tttcttcttcagccggatctt

SEQ ID NO: 4651 - RNA, 21 nt, synthetic construct
  source 1..21: mol_type = other RNA
tatctggcacttgtgtccttt

SEQ ID NO: 4652 - RNA, 21 nt, synthetic construct
  source 1..21: mol_type = other RNA
ttccagtccacatagttggtt

SEQ ID NO: 4653 - RNA, 21 nt, synthetic construct
  source 1..21: mol_type = other RNA
tatccagtccacatagttgtt

SEQ ID NO: 4654 - RNA, 21 nt, synthetic construct
  source 1..21: mol_type = other RNA
tttgatccagtccacatagtt

SEQ ID NO: 4655 - RNA, 21 nt, synthetic construct
  source 1..21: mol_type = other RNA
tgttgatccagtccacatatt

SEQ ID NO: 4656 - RNA, 19 nt, synthetic construct
  source 1..19: mol_type = other RNA
taagcatttctctgtgccg

SEQ ID NO: 4657 - RNA, 19 nt, synthetic construct
  source 1..19: mol_type = other RNA
taaagcatttctctgtgcc

SEQ ID NO: 4658 - RNA, 19 nt, synthetic construct
  source 1..19: mol_type = other RNA
tcaaagcatttctctgtgc

SEQ ID NO: 4659 - RNA, 19 nt, synthetic construct
  source 1..19: mol_type = other RNA
ttcaaagcatttctctgtg

SEQ ID NO: 4660 - RNA, 19 nt, synthetic construct
  source 1..19: mol_type = other RNA
tatcaaagcatttctctgt

SEQ ID NO: 4661 - RNA, 19 nt, synthetic construct
  source 1..19: mol_type = other RNA
tcatcaaagcatttctctg

SEQ ID NO: 4662 - RNA, 19 nt, synthetic construct
  source 1..19: mol_type = other RNA
ttcatcaaagcatttctct

SEQ ID NO: 4663 - RNA, 19 nt, synthetic construct
  source 1..19: mol_type = other RNA
tgtctcatcaaagcatttc

SEQ ID NO: 4664 - RNA, 19 nt, synthetic construct
  source 1..19: mol_type = other RNA
tctcagacaagctgtatgt

SEQ ID NO: 4665 - RNA, 19 nt, synthetic construct
  source 1..19: mol_type = other RNA
ttcttcttcagccggatca

SEQ ID NO: 4666 - RNA, 19 nt, synthetic construct
  source 1..19: mol_type = other RNA
tttcttcttcagccggatc

SEQ ID NO: 4667 - RNA, 19 nt, synthetic construct
  source 1..19: mol_type = other RNA
tatctggcacttgtgtcct

SEQ ID NO: 4668 - RNA, 19 nt, synthetic construct
  source 1..19: mol_type = other RNA
ttccagtccacatagttgg

SEQ ID NO: 4669 - RNA, 19 nt, synthetic construct
  source 1..19: mol_type = other RNA
tatccagtccacatagttg

SEQ ID NO: 4670 - RNA, 19 nt, synthetic construct
  source 1..19: mol_type = other RNA
tttgatccagtccacatag

SEQ ID NO: 4671 - RNA, 19 nt, synthetic construct
  source 1..19: mol_type = other RNA
tgttgatccagtccacata

SEQ ID NO: 4672 - RNA, 21 nt, synthetic construct
  source 1..21: mol_type = other RNA
  modified_base 9: mod_base = OTHER; note = 2-fluoro-modified nucleoside
  modified_base 10: mod_base = OTHER; note = 2-fluoro-modified nucleoside
  modified_base 19^20: mod_base = OTHER; note = phosphorothioate linkage
  modified_base 20^21: mod_base = OTHER; note = phosphorothioate linkage
  modified_base 1: mod_base = OTHER; note = 2-O-methyl modified nucleoside
  modified_base 2: mod_base = OTHER; note = 2-O-methyl modified nucleoside
  modified_base 3: mod_base = OTHER; note = 2-O-methyl modified nucleoside
  modified_base 4: mod_base = OTHER; note = 2-O-methyl modified nucleoside
  modified_base 5: mod_base = OTHER; note = 2-O-methyl modified nucleoside
  modified_base 19: mod_base = OTHER; note = 2-O-methyl modified nucleoside
  modified_base 20: mod_base = OTHER; note = 2-O-methyl modified nucleoside
  modified_base 21: mod_base = OTHER; note = 2-O-methyl modified nucleoside
  modified_base 15: mod_base = OTHER; note = 2-O-methyl modified nucleoside
  modified_base 16: mod_base = OTHER; note = 2-O-methyl modified nucleoside
actatcctggtgacctctatt

SEQ ID NO: 4673 - RNA, 21 nt, synthetic construct
  source 1..21: mol_type = other RNA
  modified_base 7: mod_base = OTHER; note = 2-fluoro-modified nucleoside
  modified_base 9: mod_base = OTHER; note = 2-fluoro-modified nucleoside
  modified_base 10: mod_base = OTHER; note = 2-fluoro-modified nucleoside
  modified_base 19^20: mod_base = OTHER; note = phosphorothioate linkage
  modified_base 20^21: mod_base = OTHER; note = phosphorothioate linkage
  modified_base 1: mod_base = OTHER; note = 2-O-methyl modified nucleoside
  modified_base 2: mod_base = OTHER; note = 2-O-methyl modified nucleoside
  modified_base 3: mod_base = OTHER; note = 2-O-methyl modified nucleoside
  modified_base 4: mod_base = OTHER; note = 2-O-methyl modified nucleoside
  modified_base 5: mod_base = OTHER; note = 2-O-methyl modified nucleoside
  modified_base 19: mod_base = OTHER; note = 2-O-methyl modified nucleoside
  modified_base 20: mod_base = OTHER; note = 2-O-methyl modified nucleoside
  modified_base 21: mod_base = OTHER; note = 2-O-methyl modified nucleoside
  modified_base 15: mod_base = OTHER; note = 2-O-methyl modified nucleoside
  modified_base 16: mod_base = OTHER; note = 2-O-methyl modified nucleoside
tgtgccacaactcacaacatt

SEQ ID NO: 4674 - RNA, 21 nt, synthetic construct
  source 1..21: mol_type = other RNA
  modified_base 6: mod_base = OTHER; note = 2-fluoro-modified nucleoside
  modified_base 7: mod_base = OTHER; note = 2-fluoro-modified nucleoside
  modified_base 9: mod_base = OTHER; note = 2-fluoro-modified nucleoside
  modified_base 19^20: mod_base = OTHER; note = phosphorothioate linkage
  modified_base 20^21: mod_base = OTHER; note = phosphorothioate linkage
  modified_base 1: mod_base = OTHER; note = 2-O-methyl modified nucleoside
  modified_base 2: mod_base = OTHER; note = 2-O-methyl modified nucleoside
  modified_base 3: mod_base = OTHER; note = 2-O-methyl modified nucleoside
  modified_base 4: mod_base = OTHER; note = 2-O-methyl modified nucleoside
  modified_base 5: mod_base = OTHER; note = 2-O-methyl modified nucleoside
  modified_base 19: mod_base = OTHER; note = 2-O-methyl modified nucleoside
  modified_base 20: mod_base = OTHER; note = 2-O-methyl modified nucleoside
  modified_base 21: mod_base = OTHER; note = 2-O-methyl modified nucleoside
  modified_base 21: mod_base = OTHER; note = 2-O-methyl modified nucleoside
  modified_base 15: mod_base = OTHER; note = 2-O-methyl modified nucleoside
  modified_base 16: mod_base = OTHER; note = 2-O-methyl modified nucleoside
  modified_base 17: mod_base = OTHER; note = 2-O-methyl modified nucleoside
acaactcacaactacgacatt

SEQ ID NO: 4675 - RNA, 21 nt, synthetic construct
  source 1..21: mol_type = other RNA
  modified_base 5: mod_base = OTHER; note = 2-fluoro-modified nucleoside
  modified_base 7: mod_base = OTHER; note = 2-fluoro-modified nucleoside
  modified_base 9: mod_base = OTHER; note = 2-fluoro-modified nucleoside
  modified_base 19^20: mod_base = OTHER; note = phosphorothioate linkage
  modified_base 20^21: mod_base = OTHER; note = phosphorothioate linkage
  modified_base 1: mod_base = OTHER; note = 2-O-methyl modified nucleoside
  modified_base 2: mod_base = OTHER; note = 2-O-methyl modified nucleoside
  modified_base 3: mod_base = OTHER; note = 2-O-methyl modified nucleoside
  modified_base 4: mod_base = OTHER; note = 2-O-methyl modified nucleoside
  modified_base 5: mod_base = OTHER; note = 2-O-methyl modified nucleoside
  modified_base 6: mod_base = OTHER; note = 2-O-methyl modified nucleoside
  modified_base 15: mod_base = OTHER; note = 2-O-methyl modified nucleoside
  modified_base 16: mod_base = OTHER; note = 2-O-methyl modified nucleoside
  modified_base 17: mod_base = OTHER; note = 2-O-methyl modified nucleoside
  modified_base 18: mod_base = OTHER; note = 2-O-methyl modified nucleoside
  modified_base 19: mod_base = OTHER; note = 2-O-methyl modified nucleoside
  modified_base 20: mod_base = OTHER; note = 2-O-methyl modified nucleoside
  modified_base 21: mod_base = OTHER; note = 2-O-methyl modified nucleoside
acaactcacaactacgacatt

SEQ ID NO: 4676 - RNA, 21 nt, synthetic construct
  source 1..21: mol_type = other RNA
  modified_base 5: mod_base = OTHER; note = 2-fluoro-modified nucleoside
  modified_base 6: mod_base = OTHER; note = 2-fluoro-modified nucleoside
  modified_base 9: mod_base = OTHER; note = 2-fluoro-modified nucleoside
  modified_base 19^20: mod_base = OTHER; note = phosphorothioate linkage
  modified_base 20^21: mod_base = OTHER; note = phosphorothioate linkage
  modified_base 1: mod_base = OTHER; note = 2-O-methyl modified nucleoside
  modified_base 2: mod_base = OTHER; note = 2-O-methyl modified nucleoside
  modified_base 3: mod_base = OTHER; note = 2-O-methyl modified nucleoside
  modified_base 4: mod_base = OTHER; note = 2-O-methyl modified nucleoside
  modified_base 15: mod_base = OTHER; note = 2-O-methyl modified nucleoside
  modified_base 16: mod_base = OTHER; note = 2-O-methyl modified nucleoside
  modified_base 17: mod_base = OTHER; note = 2-O-methyl modified nucleoside
  modified_base 18: mod_base = OTHER; note = 2-O-methyl modified nucleoside
  modified_base 19: mod_base = OTHER; note = 2-O-methyl modified nucleoside
  modified_base 20: mod_base = OTHER; note = 2-O-methyl modified nucleoside
  modified_base 21: mod_base = OTHER; note = 2-O-methyl modified nucleoside
acaactcacaactacgacatt

SEQ ID NO: 4677 - RNA, 21 nt, synthetic construct
  source 1..21: mol_type = other RNA
  modified_base 9: mod_base = OTHER; note = 2-fluoro-modified nucleoside
  modified_base 10: mod_base = OTHER; note = 2-fluoro-modified nucleoside
  modified_base 19^20: mod_base = OTHER; note = phosphorothioate linkage
  modified_base 20^21: mod_base = OTHER; note = phosphorothioate linkage
  modified_base 1: mod_base = OTHER; note = 2-O-methyl modified nucleoside
  modified_base 2: mod_base = OTHER; note = 2-O-methyl modified nucleoside
  modified_base 3: mod_base = OTHER; note = 2-O-methyl modified nucleoside
  modified_base 4: mod_base = OTHER; note = 2-O-methyl modified nucleoside
  modified_base 5: mod_base = OTHER; note = 2-O-methyl modified nucleoside
  modified_base 6: mod_base = OTHER; note = 2-O-methyl modified nucleoside
  modified_base 15: mod_base = OTHER; note = 2-O-methyl modified nucleoside
  modified_base 16: mod_base = OTHER; note = 2-O-methyl modified nucleoside
  modified_base 17: mod_base = OTHER; note = 2-O-methyl modified nucleoside
  modified_base 18: mod_base = OTHER; note = 2-O-methyl modified nucleoside
  modified_base 19: mod_base = OTHER; note = 2-O-methyl modified nucleoside
  modified_base 20: mod_base = OTHER; note = 2-O-methyl modified nucleoside
  modified_base 21: mod_base = OTHER; note = 2-O-methyl modified nucleoside
acttcttcaaccgcacgaatt

SEQ ID NO: 4678 - RNA, 21 nt, synthetic construct
  source 1..21: mol_type = other RNA
  modified_base 6: mod_base = OTHER; note = 2-fluoro-modified nucleoside
  modified_base 8: mod_base = OTHER; note = 2-fluoro-modified nucleoside
  modified_base 9: mod_base = OTHER; note = 2-fluoro-modified nucleoside
  modified_base 19^20: mod_base = OTHER; note = phosphorothioate linkage
  modified_base 20^21: mod_base = OTHER; note = phosphorothioate linkage
  modified_base 1: mod_base = OTHER; note = 2-O-methyl modified nucleoside
  modified_base 2: mod_base = OTHER; note = 2-O-methyl modified nucleoside
  modified_base 3: mod_base = OTHER; note = 2-O-methyl modified nucleoside
  modified_base 4: mod_base = OTHER; note = 2-O-methyl modified nucleoside
  modified_base 5: mod_base = OTHER; note = 2-O-methyl modified nucleoside
  modified_base 16: mod_base = OTHER; note = 2-O-methyl modified nucleoside
  modified_base 17: mod_base = OTHER; note = 2-O-methyl modified nucleoside
  modified_base 18: mod_base = OTHER; note = 2-O-methyl modified nucleoside
  modified_base 19: mod_base = OTHER; note = 2-O-methyl modified nucleoside
  modified_base 21: mod_base = OTHER; note = 2-O-methyl modified nucleoside
  modified_base 10: mod_base = OTHER; note = 2-O-methyl modified nucleoside
  modified_base 11: mod_base = OTHER; note = 2-O-methyl modified nucleoside
ttcggcatcgagaagtacatt

SEQ ID NO: 4679 - RNA, 21 nt, synthetic construct
  source 1..21: mol_type = other RNA
  modified_base 8: mod_base = OTHER; note = 2-fluoro-modified nucleoside
  modified_base 9: mod_base = OTHER; note = 2-fluoro-modified nucleoside
  modified_base 11: mod_base = OTHER; note = 2-fluoro-modified nucleoside
  modified_base 19^20: mod_base = OTHER; note = phosphorothioate linkage
  modified_base 20^21: mod_base = OTHER; note = phosphorothioate linkage
  modified_base 1: mod_base = OTHER; note = 2-O-methyl modified nucleoside
  modified_base 2: mod_base = OTHER; note = 2-O-methyl modified nucleoside
  modified_base 3: mod_base = OTHER; note = 2-O-methyl modified nucleoside
  modified_base 4: mod_base = OTHER; note = 2-O-methyl modified nucleoside
  modified_base 5: mod_base = OTHER; note = 2-O-methyl modified nucleoside
  modified_base 15: mod_base = OTHER; note = 2-O-methyl modified nucleoside
  modified_base 16: mod_base = OTHER; note = 2-O-methyl modified nucleoside
  modified_base 17: mod_base = OTHER; note = 2-O-methyl modified nucleoside
  modified_base 18: mod_base = OTHER; note = 2-O-methyl modified nucleoside
  modified_base 19: mod_base = OTHER; note = 2-O-methyl modified nucleoside
  modified_base 20: mod_base = OTHER; note = 2-O-methyl modified nucleoside
  modified_base 21: mod_base = OTHER; note = 2-O-methyl modified nucleoside
atcgagaagtacatcccgatt

SEQ ID NO: 4680 - RNA, 21 nt, synthetic construct
  source 1..21: mol_type = other RNA
  modified_base 6: mod_base = OTHER; note = 2-fluoro-modified nucleoside
  modified_base 9: mod_base = OTHER; note = 2-fluoro-modified nucleoside
  modified_base 11: mod_base = OTHER; note = 2-fluoro-modified nucleoside
  modified_base 19^20: mod_base = OTHER; note = phosphorothioate linkage
  modified_base 20^21: mod_base = OTHER; note = phosphorothioate linkage
  modified_base 1: mod_base = OTHER; note = 2-O-methyl modified nucleoside
  modified_base 2: mod_base = OTHER; note = 2-O-methyl modified nucleoside
  modified_base 3: mod_base = OTHER; note = 2-O-methyl modified nucleoside
  modified_base 4: mod_base = OTHER; note = 2-O-methyl modified nucleoside
  modified_base 5: mod_base = OTHER; note = 2-O-methyl modified nucleoside
  modified_base 6: mod_base = OTHER; note = 2-O-methyl modified nucleoside
  modified_base 16: mod_base = OTHER; note = 2-O-methyl modified nucleoside
  modified_base 17: mod_base = OTHER; note = 2-O-methyl modified nucleoside
  modified_base 18: mod_base = OTHER; note = 2-O-methyl modified nucleoside
  modified_base 19: mod_base = OTHER; note = 2-O-methyl modified nucleoside
  modified_base 20: mod_base = OTHER; note = 2-O-methyl modified nucleoside
  modified_base 21: mod_base = OTHER; note = 2-O-methyl modified nucleoside
atcgagaagtacatcccgatt

SEQ ID NO: 4681 - RNA, 21 nt, synthetic construct
  source 1..21: mol_type = other RNA
  modified_base 6: mod_base = OTHER; note = 2-fluoro-modified nucleoside
  modified_base 9: mod_base = OTHER; note = 2-fluoro-modified nucleoside
  modified_base 8: mod_base = OTHER; note = 2-fluoro-modified nucleoside
  modified_base 19^20: mod_base = OTHER; note = phosphorothioate linkage
  modified_base 20^21: mod_base = OTHER; note = phosphorothioate linkage
  modified_base 1: mod_base = OTHER; note = 2-O-methyl modified nucleoside
  modified_base 2: mod_base = OTHER; note = 2-O-methyl modified nucleoside
  modified_base 3: mod_base = OTHER; note = 2-O-methyl modified nucleoside
  modified_base 4: mod_base = OTHER; note = 2-O-methyl modified nucleoside
  modified_base 5: mod_base = OTHER; note = 2-O-methyl modified nucleoside
  modified_base 7: mod_base = OTHER; note = 2-O-methyl modified nucleoside
  modified_base 18: mod_base = OTHER; note = 2-O-methyl modified nucleoside
  modified_base 12: mod_base = OTHER; note = 2-O-methyl modified nucleoside
  modified_base 19: mod_base = OTHER; note = 2-O-methyl modified nucleoside
  modified_base 20: mod_base = OTHER; note = 2-O-methyl modified nucleoside
  modified_base 21: mod_base = OTHER; note = 2-O-methyl modified nucleoside
atcgagaagtacatcccgatt

SEQ ID NO: 4682 - RNA, 21 nt, synthetic construct
  source 1..21: mol_type = other RNA
  modified_base 6: mod_base = OTHER; note = 2-fluoro-modified nucleoside
  modified_base 9: mod_base = OTHER; note = 2-fluoro-modified nucleoside
  modified_base 8: mod_base = OTHER; note = 2-fluoro-modified nucleoside
  modified_base 19^20: mod_base = OTHER; note = phosphorothioate linkage
  modified_base 20^21: mod_base = OTHER; note = phosphorothioate linkage
  modified_base 1: mod_base = OTHER; note = 2-O-methyl modified nucleoside
  modified_base 2: mod_base = OTHER; note = 2-O-methyl modified nucleoside
  modified_base 3: mod_base = OTHER; note = 2-O-methyl modified nucleoside
  modified_base 4: mod_base = OTHER; note = 2-O-methyl modified nucleoside
  modified_base 5: mod_base = OTHER; note = 2-O-methyl modified nucleoside
  modified_base 10: mod_base = OTHER; note = 2-O-methyl modified nucleoside
  modified_base 12: mod_base = OTHER; note = 2-O-methyl modified nucleoside
  modified_base 14: mod_base = OTHER; note = 2-O-methyl modified nucleoside
  modified_base 16: mod_base = OTHER; note = 2-O-methyl modified nucleoside
  modified_base 18: mod_base = OTHER; note = 2-O-methyl modified nucleoside
  modified_base 20: mod_base = OTHER; note = 2-O-methyl modified nucleoside
  modified_base 21: mod_base = OTHER; note = 2-O-methyl modified nucleoside
atcgagaagtacatcccgatt

SEQ ID NO: 4683 - RNA, 21 nt, synthetic construct
  source 1..21: mol_type = other RNA
  modified_base 6: mod_base = OTHER; note = 2-fluoro-modified nucleoside
  modified_base 8: mod_base = OTHER; note = 2-fluoro-modified nucleoside
  modified_base 11: mod_base = OTHER; note = 2-fluoro-modified nucleoside
  modified_base 19^20: mod_base = OTHER; note = phosphorothioate linkage
  modified_base 20^21: mod_base = OTHER; note = phosphorothioate linkage
  modified_base 1: mod_base = OTHER; note = 2-O-methyl modified nucleoside
  modified_base 2: mod_base = OTHER; note = 2-O-methyl modified nucleoside
  modified_base 3: mod_base = OTHER; note = 2-O-methyl modified nucleoside
  modified_base 4: mod_base = OTHER; note = 2-O-methyl modified nucleoside
  modified_base 5: mod_base = OTHER; note = 2-O-methyl modified nucleoside
  modified_base 10: mod_base = OTHER; note = 2-O-methyl modified nucleoside
  modified_base 12: mod_base = OTHER; note = 2-O-methyl modified nucleoside
  modified_base 14: mod_base = OTHER; note = 2-O-methyl modified nucleoside
  modified_base 16: mod_base = OTHER; note = 2-O-methyl modified nucleoside
  modified_base 18: mod_base = OTHER; note = 2-O-methyl modified nucleoside
  modified_base 19: mod_base = OTHER; note = 2-O-methyl modified nucleoside
  modified_base 21: mod_base = OTHER; note = 2-O-methyl modified nucleoside
atcgagaagtacatcccgatt

SEQ ID NO: 4684 - RNA, 21 nt, synthetic construct
  source 1..21: mol_type = other RNA
  modified_base 6: mod_base = OTHER; note = 2-fluoro-modified nucleoside
  modified_base 7: mod_base = OTHER; note = 2-fluoro-modified nucleoside
  modified_base 9: mod_base = OTHER; note = 2-fluoro-modified nucleoside
  modified_base 19^20: mod_base = OTHER; note = phosphorothioate linkage
  modified_base 20^21: mod_base = OTHER; note = phosphorothioate linkage
  modified_base 10: mod_base = OTHER; note = 2-O-methyl modified nucleoside
  modified_base 12: mod_base = OTHER; note = 2-O-methyl modified nucleoside
  modified_base 14: mod_base = OTHER; note = 2-O-methyl modified nucleoside
  modified_base 16: mod_base = OTHER; note = 2-O-methyl modified nucleoside
  modified_base 18: mod_base = OTHER; note = 2-O-methyl modified nucleoside
  modified_base 19: mod_base = OTHER; note = 2-O-methyl modified nucleoside
  modified_base 20: mod_base = OTHER; note = 2-O-methyl modified nucleoside
  modified_base 21: mod_base = OTHER; note = 2-O-methyl modified nucleoside
  modified_base 1: mod_base = OTHER; note = 2-O-methyl modified nucleoside
  modified_base 2: mod_base = OTHER; note = 2-O-methyl modified nucleoside
  modified_base 3: mod_base = OTHER; note = 2-O-methyl modified nucleoside
  modified_base 4: mod_base = OTHER; note = 2-O-methyl modified nucleoside
atcgagaagtacatcccgatt

SEQ ID NO: 4685 - RNA, 21 nt, synthetic construct
  source 1..21: mol_type = other RNA
  modified_base 6: mod_base = OTHER; note = 2-fluoro-modified nucleoside
  modified_base 7: mod_base = OTHER; note = 2-fluoro-modified nucleoside
  modified_base 9: mod_base = OTHER; note = 2-fluoro-modified nucleoside
  modified_base 11: mod_base = OTHER; note = 2-fluoro-modified nucleoside
  modified_base 19^20: mod_base = OTHER; note = phosphorothioate linkage
  modified_base 20^21: mod_base = OTHER; note = phosphorothioate linkage
  modified_base 1: mod_base = OTHER; note = 2-O-methyl modified nucleoside
  modified_base 2: mod_base = OTHER; note = 2-O-methyl modified nucleoside
  modified_base 3: mod_base = OTHER; note = 2-O-methyl modified nucleoside
  modified_base 4: mod_base = OTHER; note = 2-O-methyl modified nucleoside
  modified_base 5: mod_base = OTHER; note = 2-O-methyl modified nucleoside
  modified_base 10: mod_base = OTHER; note = 2-O-methyl modified nucleoside
  modified_base 12: mod_base = OTHER; note = 2-O-methyl modified nucleoside
  modified_base 14: mod_base = OTHER; note = 2-O-methyl modified nucleoside
  modified_base 16: mod_base = OTHER; note = 2-O-methyl modified nucleoside
  modified_base 18: mod_base = OTHER; note = 2-O-methyl modified nucleoside
  modified_base 19: mod_base = OTHER; note = 2-O-methyl modified nucleoside
  modified_base 20: mod_base = OTHER; note = 2-O-methyl modified nucleoside
  modified_base 21: mod_base = OTHER; note = 2-O-methyl modified nucleoside
atcgagaagtacatcccgatt

SEQ ID NO: 4686 - RNA, 21 nt, synthetic construct
  source 1..21: mol_type = other RNA
  modified_base 6: mod_base = OTHER; note = 2-fluoro-modified nucleoside
  modified_base 7: mod_base = OTHER; note = 2-fluoro-modified nucleoside
  modified_base 8: mod_base = OTHER; note = 2-fluoro-modified nucleoside
  modified_base 9: mod_base = OTHER; note = 2-fluoro-modified nucleoside
  modified_base 19^20: mod_base = OTHER; note = phosphorothioate linkage
  modified_base 20^21: mod_base = OTHER; note = phosphorothioate linkage
  modified_base 1: mod_base = OTHER; note = 2-O-methyl modified nucleoside
  modified_base 2: mod_base = OTHER; note = 2-O-methyl modified nucleoside
  modified_base 3: mod_base = OTHER; note = 2-O-methyl modified nucleoside
  modified_base 4: mod_base = OTHER; note = 2-O-methyl modified nucleoside
  modified_base 10: mod_base = OTHER; note = 2-O-methyl modified nucleoside
  modified_base 12: mod_base = OTHER; note = 2-O-methyl modified nucleoside
  modified_base 14: mod_base = OTHER; note = 2-O-methyl modified nucleoside
  modified_base 16: mod_base = OTHER; note = 2-O-methyl modified nucleoside
  modified_base 18: mod_base = OTHER; note = 2-O-methyl modified nucleoside
  modified_base 19: mod_base = OTHER; note = 2-O-methyl modified nucleoside
  modified_base 20: mod_base = OTHER; note = 2-O-methyl modified nucleoside
  modified_base 21: mod_base = OTHER; note = 2-O-methyl modified nucleoside
atcgagaagtacatcccgatt

SEQ ID NO: 4687 - RNA, 21 nt, synthetic construct
  source 1..21: mol_type = other RNA
  modified_base 6: mod_base = OTHER; note = 2-fluoro-modified nucleoside
  modified_base 7: mod_base = OTHER; note = 2-fluoro-modified nucleoside
  modified_base 8: mod_base = OTHER; note = 2-fluoro-modified nucleoside
  modified_base 9: mod_base = OTHER; note = 2-fluoro-modified nucleoside
  modified_base 11: mod_base = OTHER; note = 2-fluoro-modified nucleoside
  modified_base 19^20: mod_base = OTHER; note = phosphorothioate linkage
  modified_base 20^21: mod_base = OTHER; note = phosphorothioate linkage
  modified_base 1: mod_base = OTHER; note = 2-O-methyl modified nucleoside
  modified_base 2: mod_base = OTHER; note = 2-O-methyl modified nucleoside
  modified_base 3: mod_base = OTHER; note = 2-O-methyl modified nucleoside
  modified_base 4: mod_base = OTHER; note = 2-O-methyl modified nucleoside
  modified_base 19: mod_base = OTHER; note = 2-O-methyl modified nucleoside
  modified_base 20: mod_base = OTHER; note = 2-O-methyl modified nucleoside
  modified_base 21: mod_base = OTHER; note = 2-O-methyl modified nucleoside
  modified_base 14: mod_base = OTHER; note = 2-O-methyl modified nucleoside
  modified_base 15: mod_base = OTHER; note = 2-O-methyl modified nucleoside
atcgagaagtacatcccgatt

SEQ ID NO: 4688 - RNA, 21 nt, synthetic construct
  source 1..21: mol_type = other RNA
  modified_base 5: mod_base = OTHER; note = 2-fluoro-modified nucleoside
  modified_base 9: mod_base = OTHER; note = 2-fluoro-modified nucleoside
  modified_base 11: mod_base = OTHER; note = 2-fluoro-modified nucleoside
  modified_base 19^20: mod_base = OTHER; note = phosphorothioate linkage
  modified_base 20^21: mod_base = OTHER; note = phosphorothioate linkage
  modified_base 19: mod_base = OTHER; note = 2-O-methyl modified nucleoside
  modified_base 20: mod_base = OTHER; note = 2-O-methyl modified nucleoside
  modified_base 21: mod_base = OTHER; note = 2-O-methyl modified nucleoside
  modified_base 1: mod_base = OTHER; note = 2-O-methyl modified nucleoside
  modified_base 2: mod_base = OTHER; note = 2-O-methyl modified nucleoside
  modified_base 3: mod_base = OTHER; note = 2-O-methyl modified nucleoside
  modified_base 4: mod_base = OTHER; note = 2-O-methyl modified nucleoside
  modified_base 5: mod_base = OTHER; note = 2-O-methyl modified nucleoside
  modified_base 10: mod_base = OTHER; note = 2-O-methyl modified nucleoside
  modified_base 12: mod_base = OTHER; note = 2-O-methyl modified nucleoside
atcgagaagtacatcccgatt

SEQ ID NO: 4689 - RNA, 21 nt, synthetic construct
  source 1..21: mol_type = other RNA
  modified_base 5: mod_base = OTHER; note = 2-fluoro-modified nucleoside
  modified_base 8: mod_base = OTHER; note = 2-fluoro-modified nucleoside
  modified_base 9: mod_base = OTHER; note = 2-fluoro-modified nucleoside
  modified_base 19^20: mod_base = OTHER; note = phosphorothioate linkage
  modified_base 20^21: mod_base = OTHER; note = phosphorothioate linkage
  modified_base 1: mod_base = OTHER; note = 2-O-methyl modified nucleoside
  modified_base 2: mod_base = OTHER; note = 2-O-methyl modified nucleoside
  modified_base 3: mod_base = OTHER; note = 2-O-methyl modified nucleoside
  modified_base 4: mod_base = OTHER; note = 2-O-methyl modified nucleoside
  modified_base 19: mod_base = OTHER; note = 2-O-methyl modified nucleoside
  modified_base 20: mod_base = OTHER; note = 2-O-methyl modified nucleoside
  modified_base 21: mod_base = OTHER; note = 2-O-methyl modified nucleoside
  modified_base 10: mod_base = OTHER; note = 2-O-methyl modified nucleoside
  modified_base 13: mod_base = OTHER; note = 2-O-methyl modified nucleoside
  modified_base 16: mod_base = OTHER; note = 2-O-methyl modified nucleoside
atcgagaagtacatcccgatt

SEQ ID NO: 4690 - RNA, 21 nt, synthetic construct
  source 1..21: mol_type = other RNA
  modified_base 5: mod_base = OTHER; note = 2-fluoro-modified nucleoside
  modified_base 8: mod_base = OTHER; note = 2-fluoro-modified nucleoside
  modified_base 9: mod_base = OTHER; note = 2-fluoro-modified nucleoside
  modified_base 11: mod_base = OTHER; note = 2-fluoro-modified nucleoside
  modified_base 19^20: mod_base = OTHER; note = phosphorothioate linkage
  modified_base 20^21: mod_base = OTHER; note = phosphorothioate linkage
  modified_base 1: mod_base = OTHER; note = 2-O-methyl modified nucleoside
  modified_base 2: mod_base = OTHER; note = 2-O-methyl modified nucleoside
  modified_base 3: mod_base = OTHER; note = 2-O-methyl modified nucleoside
  modified_base 4: mod_base = OTHER; note = 2-O-methyl modified nucleoside
  modified_base 19: mod_base = OTHER; note = 2-O-methyl modified nucleoside
  modified_base 20: mod_base = OTHER; note = 2-O-methyl modified nucleoside
  modified_base 21: mod_base = OTHER; note = 2-O-methyl modified nucleoside
  modified_base 15: mod_base = OTHER; note = 2-O-methyl modified nucleoside
  modified_base 17: mod_base = OTHER; note = 2-O-methyl modified nucleoside
atcgagaagtacatcccgatt

SEQ ID NO: 4691 - RNA, 21 nt, synthetic construct
  source 1..21: mol_type = other RNA
  modified_base 5: mod_base = OTHER; note = 2-fluoro-modified nucleoside
  modified_base 7: mod_base = OTHER; note = 2-fluoro-modified nucleoside
  modified_base 9: mod_base = OTHER; note = 2-fluoro-modified nucleoside
  modified_base 19^20: mod_base = OTHER; note = phosphorothioate linkage
  modified_base 20^21: mod_base = OTHER; note = phosphorothioate linkage
  modified_base 1: mod_base = OTHER; note = 2-O-methyl modified nucleoside
  modified_base 2: mod_base = OTHER; note = 2-O-methyl modified nucleoside
  modified_base 3: mod_base = OTHER; note = 2-O-methyl modified nucleoside
  modified_base 4: mod_base = OTHER; note = 2-O-methyl modified nucleoside
  modified_base 10: mod_base = OTHER; note = 2-O-methyl modified nucleoside
  modified_base 12: mod_base = OTHER; note = 2-O-methyl modified nucleoside
  modified_base 15: mod_base = OTHER; note = 2-O-methyl modified nucleoside
  modified_base 17: mod_base = OTHER; note = 2-O-methyl modified nucleoside
  modified_base 19: mod_base = OTHER; note = 2-O-methyl modified nucleoside
  modified_base 20: mod_base = OTHER; note = 2-O-methyl modified nucleoside
  modified_base 21: mod_base = OTHER; note = 2-O-methyl modified nucleoside
atcgagaagtacatcccgatt

SEQ ID NO: 4692 - RNA, 21 nt, synthetic construct
  source 1..21: mol_type = other RNA
  modified_base 5: mod_base = OTHER; note = 2-fluoro-modified nucleoside
  modified_base 7: mod_base = OTHER; note = 2-fluoro-modified nucleoside
  modified_base 9: mod_base = OTHER; note = 2-fluoro-modified nucleoside
  modified_base 11: mod_base = OTHER; note = 2-fluoro-modified nucleoside
  modified_base 19^20: mod_base = OTHER; note = phosphorothioate linkage
  modified_base 20^21: mod_base = OTHER; note = phosphorothioate linkage
  modified_base 1: mod_base = OTHER; note = 2-O-methyl modified nucleoside
  modified_base 2: mod_base = OTHER; note = 2-O-methyl modified nucleoside
  modified_base 3: mod_base = OTHER; note = 2-O-methyl modified nucleoside
  modified_base 4: mod_base = OTHER; note = 2-O-methyl modified nucleoside
  modified_base 19: mod_base = OTHER; note = 2-O-methyl modified nucleoside
  modified_base 20: mod_base = OTHER; note = 2-O-methyl modified nucleoside
  modified_base 21: mod_base = OTHER; note = 2-O-methyl modified nucleoside
  modified_base 15: mod_base = OTHER; note = 2-O-methyl modified nucleoside
  modified_base 16: mod_base = OTHER; note = 2-O-methyl modified nucleoside
  modified_base 17: mod_base = OTHER; note = 2-O-methyl modified nucleoside
atcgagaagtacatcccgatt

SEQ ID NO: 4693 - RNA, 21 nt, synthetic construct
  source 1..21: mol_type = other RNA
  modified_base 5: mod_base = OTHER; note = 2-fluoro-modified nucleoside
  modified_base 6: mod_base = OTHER; note = 2-fluoro-modified nucleoside
  modified_base 9: mod_base = OTHER; note = 2-fluoro-modified nucleoside
  modified_base 19^20: mod_base = OTHER; note = phosphorothioate linkage
  modified_base 20^21: mod_base = OTHER; note = phosphorothioate linkage
  modified_base 19: mod_base = OTHER; note = 2-O-methyl modified nucleoside
  modified_base 20: mod_base = OTHER; note = 2-O-methyl modified nucleoside
  modified_base 21: mod_base = OTHER; note = 2-O-methyl modified nucleoside
  modified_base 1: mod_base = OTHER; note = 2-O-methyl modified nucleoside
  modified_base 2: mod_base = OTHER; note = 2-O-methyl modified nucleoside
  modified_base 3: mod_base = OTHER; note = 2-O-methyl modified nucleoside
  modified_base 4: mod_base = OTHER; note = 2-O-methyl modified nucleoside
atcgagaagtacatcccgatt

SEQ ID NO: 4694 - RNA, 21 nt, synthetic construct
  source 1..21: mol_type = other RNA
  modified_base 5: mod_base = OTHER; note = 2-fluoro-modified nucleoside
  modified_base 6: mod_base = OTHER; note = 2-fluoro-modified nucleoside
  modified_base 9: mod_base = OTHER; note = 2-fluoro-modified nucleoside
  modified_base 11: mod_base = OTHER; note = 2-fluoro-modified nucleoside
  modified_base 19^20: mod_base = OTHER; note = phosphorothioate linkage
  modified_base 20^21: mod_base = OTHER; note = phosphorothioate linkage
  modified_base 1: mod_base = OTHER; note = 2-O-methyl modified nucleoside
  modified_base 2: mod_base = OTHER; note = 2-O-methyl modified nucleoside
  modified_base 3: mod_base = OTHER; note = 2-O-methyl modified nucleoside
  modified_base 4: mod_base = OTHER; note = 2-O-methyl modified nucleoside
  modified_base 19: mod_base = OTHER; note = 2-O-methyl modified nucleoside
  modified_base 20: mod_base = OTHER; note = 2-O-methyl modified nucleoside
  modified_base 21: mod_base = OTHER; note = 2-O-methyl modified nucleoside
  modified_base 10: mod_base = OTHER; note = 2-O-methyl modified nucleoside
  modified_base 12: mod_base = OTHER; note = 2-O-methyl modified nucleoside
  modified_base 14: mod_base = OTHER; note = 2-O-methyl modified nucleoside
atcgagaagtacatcccgatt

SEQ ID NO: 4695 - RNA, 21 nt, synthetic construct
  source 1..21: mol_type = other RNA
  modified_base 5: mod_base = OTHER; note = 2-fluoro-modified nucleoside
  modified_base 6: mod_base = OTHER; note = 2-fluoro-modified nucleoside
  modified_base 9: mod_base = OTHER; note = 2-fluoro-modified nucleoside
  modified_base 11: mod_base = OTHER; note = 2-fluoro-modified nucleoside
  modified_base 19^20: mod_base = OTHER; note = phosphorothioate linkage
  modified_base 20^21: mod_base = OTHER; note = phosphorothioate linkage
  modified_base 1: mod_base = OTHER; note = 2-O-methyl modified nucleoside
  modified_base 2: mod_base = OTHER; note = 2-O-methyl modified nucleoside
  modified_base 3: mod_base = OTHER; note = 2-O-methyl modified nucleoside
  modified_base 4: mod_base = OTHER; note = 2-O-methyl modified nucleoside
  modified_base 19: mod_base = OTHER; note = 2-O-methyl modified nucleoside
  modified_base 20: mod_base = OTHER; note = 2-O-methyl modified nucleoside
  modified_base 21: mod_base = OTHER; note = 2-O-methyl modified nucleoside
atcgagaagtacatcccgatt

SEQ ID NO: 4696 - RNA, 21 nt, synthetic construct
  source 1..21: mol_type = other RNA
  modified_base 5: mod_base = OTHER; note = 2-fluoro-modified nucleoside
  modified_base 6: mod_base = OTHER; note = 2-fluoro-modified nucleoside
  modified_base 8: mod_base = OTHER; note = 2-fluoro-modified nucleoside
  modified_base 9: mod_base = OTHER; note = 2-fluoro-modified nucleoside
  modified_base 11: mod_base = OTHER; note = 2-fluoro-modified nucleoside
  modified_base 19^20: mod_base = OTHER; note = phosphorothioate linkage
  modified_base 20^21: mod_base = OTHER; note = phosphorothioate linkage
  modified_base 19: mod_base = OTHER; note = 2-O-methyl modified nucleoside
  modified_base 20: mod_base = OTHER; note = 2-O-methyl modified nucleoside
  modified_base 21: mod_base = OTHER; note = 2-O-methyl modified nucleoside
  modified_base 1: mod_base = OTHER; note = 2-O-methyl modified nucleoside
  modified_base 2: mod_base = OTHER; note = 2-O-methyl modified nucleoside
  modified_base 3: mod_base = OTHER; note = 2-O-methyl modified nucleoside
  modified_base 4: mod_base = OTHER; note = 2-O-methyl modified nucleoside
atcgagaagtacatcccgatt

SEQ ID NO: 4697 - RNA, 21 nt, synthetic construct
  source 1..21: mol_type = other RNA
  modified_base 5: mod_base = OTHER; note = 2-fluoro-modified nucleoside
  modified_base 6: mod_base = OTHER; note = 2-fluoro-modified nucleoside
  modified_base 7: mod_base = OTHER; note = 2-fluoro-modified nucleoside
  modified_base 8: mod_base = OTHER; note = 2-fluoro-modified nucleoside
  modified_base 9: mod_base = OTHER; note = 2-fluoro-modified nucleoside
  modified_base 19^20: mod_base = OTHER; note = phosphorothioate linkage
  modified_base 20^21: mod_base = OTHER; note = phosphorothioate linkage
  modified_base 1: mod_base = OTHER; note = 2-O-methyl modified nucleoside
  modified_base 2: mod_base = OTHER; note = 2-O-methyl modified nucleoside
  modified_base 3: mod_base = OTHER; note = 2-O-methyl modified nucleoside
  modified_base 19: mod_base = OTHER; note = 2-O-methyl modified nucleoside
  modified_base 20: mod_base = OTHER; note = 2-O-methyl modified nucleoside
  modified_base 21: mod_base = OTHER; note = 2-O-methyl modified nucleoside
  modified_base 15: mod_base = OTHER; note = 2-O-methyl modified nucleoside
  modified_base 16: mod_base = OTHER; note = 2-O-methyl modified nucleoside
  modified_base 18: mod_base = OTHER; note = 2-O-methyl modified nucleoside
atcgagaagtacatcccgatt

SEQ ID NO: 4698 - RNA, 21 nt, synthetic construct
  source 1..21: mol_type = other RNA
  modified_base 9: mod_base = OTHER; note = 2-fluoro-modified nucleoside
  modified_base 11: mod_base = OTHER; note = 2-fluoro-modified nucleoside
  modified_base 19^20: mod_base = OTHER; note = phosphorothioate linkage
  modified_base 20^21: mod_base = OTHER; note = phosphorothioate linkage
  modified_base 1: mod_base = OTHER; note = 2-O-methyl modified nucleoside
  modified_base 2: mod_base = OTHER; note = 2-O-methyl modified nucleoside
  modified_base 3: mod_base = OTHER; note = 2-O-methyl modified nucleoside
  modified_base 4: mod_base = OTHER; note = 2-O-methyl modified nucleoside
  modified_base 19: mod_base = OTHER; note = 2-O-methyl modified nucleoside
  modified_base 20: mod_base = OTHER; note = 2-O-methyl modified nucleoside
  modified_base 21: mod_base = OTHER; note = 2-O-methyl modified nucleoside
  modified_base 6: mod_base = OTHER; note = 2-O-methyl modified nucleoside
  modified_base 7: mod_base = OTHER; note = 2-O-methyl modified nucleoside
tcgagaagtacatcccgtatt

SEQ ID NO: 4699 - RNA, 21 nt, synthetic construct
  source 1..21: mol_type = other RNA
  modified_base 7: mod_base = OTHER; note = 2-fluoro-modified nucleoside
  modified_base 9: mod_base = OTHER; note = 2-fluoro-modified nucleoside
  modified_base 11: mod_base = OTHER; note = 2-fluoro-modified nucleoside
  modified_base 19^20: mod_base = OTHER; note = phosphorothioate linkage
  modified_base 20^21: mod_base = OTHER; note = phosphorothioate linkage
  modified_base 1: mod_base = OTHER; note = 2-O-methyl modified nucleoside
  modified_base 2: mod_base = OTHER; note = 2-O-methyl modified nucleoside
  modified_base 3: mod_base = OTHER; note = 2-O-methyl modified nucleoside
  modified_base 4: mod_base = OTHER; note = 2-O-methyl modified nucleoside
  modified_base 6: mod_base = OTHER; note = 2-O-methyl modified nucleoside
  modified_base 19: mod_base = OTHER; note = 2-O-methyl modified nucleoside
  modified_base 20: mod_base = OTHER; note = 2-O-methyl modified nucleoside
  modified_base 21: mod_base = OTHER; note = 2-O-methyl modified nucleoside
  modified_base 12: mod_base = OTHER; note = 2-O-methyl modified nucleoside
  modified_base 13: mod_base = OTHER; note = 2-O-methyl modified nucleoside
gaagtacatcccgtacacatt

SEQ ID NO: 4700 - RNA, 21 nt, synthetic construct
  source 1..21: mol_type = other RNA
  modified_base 7: mod_base = OTHER; note = 2-fluoro-modified nucleoside
  modified_base 9: mod_base = OTHER; note = 2-fluoro-modified nucleoside
  modified_base 10: mod_base = OTHER; note = 2-fluoro-modified nucleoside
  modified_base 19^20: mod_base = OTHER; note = phosphorothioate linkage
  modified_base 20^21: mod_base = OTHER; note = phosphorothioate linkage
  modified_base 1: mod_base = OTHER; note = 2-O-methyl modified nucleoside
  modified_base 2: mod_base = OTHER; note = 2-O-methyl modified nucleoside
  modified_base 3: mod_base = OTHER; note = 2-O-methyl modified nucleoside
  modified_base 4: mod_base = OTHER; note = 2-O-methyl modified nucleoside
  modified_base 19: mod_base = OTHER; note = 2-O-methyl modified nucleoside
  modified_base 20: mod_base = OTHER; note = 2-O-methyl modified nucleoside
  modified_base 21: mod_base = OTHER; note = 2-O-methyl modified nucleoside
  modified_base 15: mod_base = OTHER; note = 2-O-methyl modified nucleoside
  modified_base 12: mod_base = OTHER; note = 2-O-methyl modified nucleoside
gaagtacatcccgtacacatt

SEQ ID NO: 4701 - RNA, 21 nt, synthetic construct
  source 1..21: mol_type = other RNA
  modified_base 5: mod_base = OTHER; note = 2-fluoro-modified nucleoside
  modified_base 9: mod_base = OTHER; note = 2-fluoro-modified nucleoside
  modified_base 11: mod_base = OTHER; note = 2-fluoro-modified nucleoside
  modified_base 19^20: mod_base = OTHER; note = phosphorothioate linkage
  modified_base 20^21: mod_base = OTHER; note = phosphorothioate linkage
  modified_base 1: mod_base = OTHER; note = 2-O-methyl modified nucleoside
  modified_base 2: mod_base = OTHER; note = 2-O-methyl modified nucleoside
  modified_base 3: mod_base = OTHER; note = 2-O-methyl modified nucleoside
  modified_base 4: mod_base = OTHER; note = 2-O-methyl modified nucleoside
  modified_base 19: mod_base = OTHER; note = 2-O-methyl modified nucleoside
  modified_base 20: mod_base = OTHER; note = 2-O-methyl modified nucleoside
  modified_base 21: mod_base = OTHER; note = 2-O-methyl modified nucleoside
  modified_base 15: mod_base = OTHER; note = 2-O-methyl modified nucleoside
gaagtacatcccgtacacatt

SEQ ID NO: 4702 - RNA, 21 nt, synthetic construct
  source 1..21: mol_type = other RNA
  modified_base 5: mod_base = OTHER; note = 2-fluoro-modified nucleoside
  modified_base 9: mod_base = OTHER; note = 2-fluoro-modified nucleoside
  modified_base 10: mod_base = OTHER; note = 2-fluoro-modified nucleoside
  modified_base 19^20: mod_base = OTHER; note = phosphorothioate linkage
  modified_base 20^21: mod_base = OTHER; note = phosphorothioate linkage
  modified_base 1: mod_base = OTHER; note = 2-O-methyl modified nucleoside
  modified_base 2: mod_base = OTHER; note = 2-O-methyl modified nucleoside
  modified_base 3: mod_base = OTHER; note = 2-O-methyl modified nucleoside
  modified_base 4: mod_base = OTHER; note = 2-O-methyl modified nucleoside
  modified_base 19: mod_base = OTHER; note = 2-O-methyl modified nucleoside
  modified_base 20: mod_base = OTHER; note = 2-O-methyl modified nucleoside2-O-methyl modified nucleoside
  modified_base 21: mod_base = OTHER; note = 2-O-methyl modified nucleoside
  modified_base 15: mod_base = OTHER; note = 2-O-methyl modified nucleoside
  modified_base 16: mod_base = OTHER; note = 2-O-methyl modified nucleoside
gaagtacatcccgtacacatt

SEQ ID NO: 4703 - RNA, 21 nt, synthetic construct
  source 1..21: mol_type = other RNA
  modified_base 5: mod_base = OTHER; note = 2-fluoro-modified nucleoside
  modified_base 7: mod_base = OTHER; note = 2-fluoro-modified nucleoside
  modified_base 9: mod_base = OTHER; note = 2-fluoro-modified nucleoside
  modified_base 11: mod_base = OTHER; note = 2-fluoro-modified nucleoside
  modified_base 19^20: mod_base = OTHER; note = phosphorothioate linkage
  modified_base 20^21: mod_base = OTHER; note = phosphorothioate linkage
  modified_base 1: mod_base = OTHER; note = 2-O-methyl modified nucleoside
  modified_base 2: mod_base = OTHER; note = 2-O-methyl modified nucleoside
  modified_base 4: mod_base = OTHER; note = 2-O-methyl modified nucleoside
  modified_base 19: mod_base = OTHER; note = 2-O-methyl modified nucleoside
  modified_base 20: mod_base = OTHER; note = 2-O-methyl modified nucleoside
  modified_base 21: mod_base = OTHER; note = 2-O-methyl modified nucleoside
gaagtacatcccgtacacatt

SEQ ID NO: 4704 - RNA, 21 nt, synthetic construct
  source 1..21: mol_type = other RNA
  modified_base 5: mod_base = OTHER; note = 2-fluoro-modified nucleoside
  modified_base 7: mod_base = OTHER; note = 2-fluoro-modified nucleoside
  modified_base 9: mod_base = OTHER; note = 2-fluoro-modified nucleoside
  modified_base 10: mod_base = OTHER; note = 2-fluoro-modified nucleoside
  modified_base 19^20: mod_base = OTHER; note = phosphorothioate linkage
  modified_base 20^21: mod_base = OTHER; note = phosphorothioate linkage
  modified_base 19: mod_base = OTHER; note = 2-O-methyl modified nucleoside
  modified_base 20: mod_base = OTHER; note = 2-O-methyl modified nucleoside
  modified_base 21: mod_base = OTHER; note = 2-O-methyl modified nucleoside
  modified_base 1: mod_base = OTHER; note = 2-O-methyl modified nucleoside
  modified_base 2: mod_base = OTHER; note = 2-O-methyl modified nucleoside
  modified_base 3: mod_base = OTHER; note = 2-O-methyl modified nucleoside
  modified_base 4: mod_base = OTHER; note = 2-O-methyl modified nucleoside
gaagtacatcccgtacacatt

SEQ ID NO: 4705 - RNA, 21 nt, synthetic construct
  source 1..21: mol_type = other RNA
  modified_base 7: mod_base = OTHER; note = 2-fluoro-modified nucleoside
  modified_base 9: mod_base = OTHER; note = 2-fluoro-modified nucleoside
  modified_base 5: mod_base = OTHER; note = 2-fluoro-modified nucleoside
  modified_base 10: mod_base = OTHER; note = 2-fluoro-modified nucleoside
  modified_base 19^20: mod_base = OTHER; note = phosphorothioate linkage
  modified_base 20^21: mod_base = OTHER; note = phosphorothioate linkage
  modified_base 1: mod_base = OTHER; note = 2-O-methyl modified nucleoside
  modified_base 2: mod_base = OTHER; note = 2-O-methyl modified nucleoside
  modified_base 3: mod_base = OTHER; note = 2-O-methyl modified nucleoside
  modified_base 14: mod_base = OTHER; note = 2-O-methyl modified nucleoside
  modified_base 19: mod_base = OTHER; note = 2-O-methyl modified nucleoside
  modified_base 20: mod_base = OTHER; note = 2-O-methyl modified nucleoside
  modified_base 21: mod_base = OTHER; note = 2-O-methyl modified nucleoside
gaagtacatcccgtacacatt

SEQ ID NO: 4706 - RNA, 21 nt, synthetic construct
  source 1..21: mol_type = other RNA
  modified_base 8: mod_base = OTHER; note = 2-fluoro-modified nucleoside
  modified_base 9: mod_base = OTHER; note = 2-fluoro-modified nucleoside
  modified_base 19^20: mod_base = OTHER; note = phosphorothioate linkage
  modified_base 20^21: mod_base = OTHER; note = phosphorothioate linkage
  modified_base 19: mod_base = OTHER; note = 2-O-methyl modified nucleoside
  modified_base 20: mod_base = OTHER; note = 2-O-methyl modified nucleoside
  modified_base 21: mod_base = OTHER; note = 2-O-methyl modified nucleoside
  modified_base 10: mod_base = OTHER; note = 2-O-methyl modified nucleoside
  modified_base 12: mod_base = OTHER; note = 2-O-methyl modified nucleoside
  modified_base 14: mod_base = OTHER; note = 2-O-methyl modified nucleoside
  modified_base 1: mod_base = OTHER; note = 2-O-methyl modified nucleoside
  modified_base 2: mod_base = OTHER; note = 2-O-methyl modified nucleoside
  modified_base 3: mod_base = OTHER; note = 2-O-methyl modified nucleoside
ctacttcgactgcaagtcatt

SEQ ID NO: 4707 - RNA, 21 nt, synthetic construct
  source 1..21: mol_type = other RNA
  modified_base 8: mod_base = OTHER; note = 2-fluoro-modified nucleoside
  modified_base 9: mod_base = OTHER; note = 2-fluoro-modified nucleoside
  modified_base 11: mod_base = OTHER; note = 2-fluoro-modified nucleoside
  modified_base 19^20: mod_base = OTHER; note = phosphorothioate linkage
  modified_base 20^21: mod_base = OTHER; note = phosphorothioate linkage
  modified_base 18: mod_base = OTHER; note = 2-O-methyl modified nucleoside
  modified_base 19: mod_base = OTHER; note = 2-O-methyl modified nucleoside
  modified_base 21: mod_base = OTHER; note = 2-O-methyl modified nucleoside
  modified_base 1: mod_base = OTHER; note = 2-O-methyl modified nucleoside
  modified_base 2: mod_base = OTHER; note = 2-O-methyl modified nucleoside
  modified_base 3: mod_base = OTHER; note = 2-O-methyl modified nucleoside
  modified_base 10: mod_base = OTHER; note = 2-O-methyl modified nucleoside
acttcgactgcaagtccgatt

SEQ ID NO: 4708 - RNA, 21 nt, synthetic construct
  source 1..21: mol_type = other RNA
  modified_base 5: mod_base = OTHER; note = 2-fluoro-modified nucleoside
  modified_base 11: mod_base = OTHER; note = 2-fluoro-modified nucleoside
  modified_base 9: mod_base = OTHER; note = 2-fluoro-modified nucleoside
  modified_base 19^20: mod_base = OTHER; note = phosphorothioate linkage
  modified_base 20^21: mod_base = OTHER; note = phosphorothioate linkage
  modified_base 1: mod_base = OTHER; note = 2-O-methyl modified nucleoside
  modified_base 2: mod_base = OTHER; note = 2-O-methyl modified nucleoside
  modified_base 3: mod_base = OTHER; note = 2-O-methyl modified nucleoside
  modified_base 10: mod_base = OTHER; note = 2-O-methyl modified nucleoside
  modified_base 12: mod_base = OTHER; note = 2-O-methyl modified nucleoside
  modified_base 15: mod_base = OTHER; note = 2-O-methyl modified nucleoside
  modified_base 19: mod_base = OTHER; note = 2-O-methyl modified nucleoside
  modified_base 20: mod_base = OTHER; note = 2-O-methyl modified nucleoside
  modified_base 21: mod_base = OTHER; note = 2-O-methyl modified nucleoside
acttcgactgcaagtccgatt

SEQ ID NO: 4709 - RNA, 21 nt, synthetic construct
  source 1..21: mol_type = other RNA
  modified_base 5: mod_base = OTHER; note = 2-fluoro-modified nucleoside
  modified_base 8: mod_base = OTHER; note = 2-fluoro-modified nucleoside
  modified_base 9: mod_base = OTHER; note = 2-fluoro-modified nucleoside
  modified_base 19^20: mod_base = OTHER; note = phosphorothioate linkage
  modified_base 20^21: mod_base = OTHER; note = phosphorothioate linkage
  modified_base 1: mod_base = OTHER; note = 2-O-methyl modified nucleoside
  modified_base 2: mod_base = OTHER; note = 2-O-methyl modified nucleoside
  modified_base 3: mod_base = OTHER; note = 2-O-methyl modified nucleoside
  modified_base 4: mod_base = OTHER; note = 2-O-methyl modified nucleoside
  modified_base 12: mod_base = OTHER; note = 2-O-methyl modified nucleoside
  modified_base 15: mod_base = OTHER; note = 2-O-methyl modified nucleoside
  modified_base 19: mod_base = OTHER; note = 2-O-methyl modified nucleoside
  modified_base 20: mod_base = OTHER; note = 2-O-methyl modified nucleoside
  modified_base 21: mod_base = OTHER; note = 2-O-methyl modified nucleoside
acttcgactgcaagtccgatt

SEQ ID NO: 4710 - RNA, 21 nt, synthetic construct
  source 1..21: mol_type = other RNA
  modified_base 5: mod_base = OTHER; note = 2-fluoro-modified nucleoside
  modified_base 8: mod_base = OTHER; note = 2-fluoro-modified nucleoside
  modified_base 9: mod_base = OTHER; note = 2-fluoro-modified nucleoside
  modified_base 11: mod_base = OTHER; note = 2-fluoro-modified nucleoside
  modified_base 19^20: mod_base = OTHER; note = phosphorothioate linkage
  modified_base 20^21: mod_base = OTHER; note = phosphorothioate linkage
  modified_base 1: mod_base = OTHER; note = 2-O-methyl modified nucleoside
  modified_base 2: mod_base = OTHER; note = 2-O-methyl modified nucleoside
  modified_base 3: mod_base = OTHER; note = 2-O-methyl modified nucleoside
  modified_base 4: mod_base = OTHER; note = 2-O-methyl modified nucleoside
  modified_base 10: mod_base = OTHER; note = 2-O-methyl modified nucleoside
  modified_base 12: mod_base = OTHER; note = 2-O-methyl modified nucleoside
  modified_base 19: mod_base = OTHER; note = 2-O-methyl modified nucleoside
  modified_base 20: mod_base = OTHER; note = 2-O-methyl modified nucleoside
  modified_base 21: mod_base = OTHER; note = 2-O-methyl modified nucleoside
acttcgactgcaagtccgatt

SEQ ID NO: 4711 - RNA, 21 nt, synthetic construct
  source 1..21: mol_type = other RNA
  modified_base 9: mod_base = OTHER; note = 2-fluoro-modified nucleoside
  modified_base 11: mod_base = OTHER; note = 2-fluoro-modified nucleoside
  modified_base 19^20: mod_base = OTHER; note = phosphorothioate linkage
  modified_base 20^21: mod_base = OTHER; note = phosphorothioate linkage
  modified_base 1: mod_base = OTHER; note = 2-O-methyl modified nucleoside
  modified_base 2: mod_base = OTHER; note = 2-O-methyl modified nucleoside
  modified_base 3: mod_base = OTHER; note = 2-O-methyl modified nucleoside
  modified_base 4: mod_base = OTHER; note = 2-O-methyl modified nucleoside
  modified_base 5: mod_base = OTHER; note = 2-O-methyl modified nucleoside
  modified_base 19: mod_base = OTHER; note = 2-O-methyl modified nucleoside
  modified_base 20: mod_base = OTHER; note = 2-O-methyl modified nucleoside
  modified_base 21: mod_base = OTHER; note = 2-O-methyl modified nucleoside
  modified_base 10: mod_base = OTHER; note = 2-O-methyl modified nucleoside
  modified_base 12: mod_base = OTHER; note = 2-O-methyl modified nucleoside
  modified_base 15: mod_base = OTHER; note = 2-O-methyl modified nucleoside
ttacctctacggcatcatatt

SEQ ID NO: 4712 - RNA, 21 nt, synthetic construct
  source 1..21: mol_type = other RNA
  modified_base 1..21: mod_base = OTHER; note = position 1, 3, 5, 7, 9, 11, 13, 15, 17, 19-21 are 2-O-methyl modified nucleoside; 2, 4, 6, 8, 10, 12, 14, 16 and 18 are 2-fluoro modified nucleoside; 19-21 has phosphorothioate linkage
tagaggtcaccaggatagttt

SEQ ID NO: 4713 - RNA, 21 nt, synthetic construct
  source 1..21: mol_type = other RNA
  modified_base 1..21: mod_base = OTHER; note = position 1, 3, 5, 7, 9, 11, 13, 15, 17, 19-21 are 2-O-methyl modified nucleoside; 2, 4, 6, 8, 10, 12, 14, 16 and 18 are 2-fluoro modified nucleoside; 19-21 has phosphorothioate linkage
tagaggtcaccaggatagttt

SEQ ID NO: 4714 - RNA, 21 nt, synthetic construct
  source 1..21: mol_type = other RNA
  modified_base 1..21: mod_base = OTHER; note = position 1, 3, 5, 7, 9, 11, 13, 15, 17, 19-21 are 2-O-methyl modified nucleoside; 2, 4, 6, 8, 10, 12, 14, 16 and 18 are 2-fluoro modified nucleoside; 19-21 has phosphorothioate linkage
tgttgtgagttgtggcacatt

SEQ ID NO: 4715 - RNA, 21 nt, synthetic construct
  source 1..21: mol_type = other RNA
  modified_base 1..21: mod_base = OTHER; note = position 1, 3, 5, 7, 9, 11, 13, 15, 17, 19-21 are 2-O-methyl modified nucleoside; 2, 4, 6, 8, 10, 12, 14, 16 and 18 are 2-fluoro modified nucleoside; 19-21 has phosphorothioate linkage
tgtcgtagttgtgagttgttt

SEQ ID NO: 4716 - RNA, 21 nt, synthetic construct
  source 1..21: mol_type = other RNA
  modified_base 1..21: mod_base = OTHER; note = position 1, 3, 5, 7, 9, 11, 13, 15, 17, 19-21 are 2-O-methyl modified nucleoside; 2, 4, 6, 8, 10, 12, 14, 16 and 18 are 2-fluoro modified nucleoside; 19-21 has phosphorothioate linkage
tgtcgtagttgtgagttgttt

SEQ ID NO: 4717 - RNA, 21 nt, synthetic construct
  source 1..21: mol_type = other RNA
  modified_base 1..21: mod_base = OTHER; note = position 1, 3, 5, 7, 9, 11, 13, 15, 17, 19-21 are 2-O-methyl modified nucleoside; 2, 4, 6, 8, 10, 12, 14, 16 and 18 are 2-fluoro modified nucleoside; 19-21 has phosphorothioate linkage
tgtcgtagttgtgagttgttt

SEQ ID NO: 4718 - RNA, 21 nt, synthetic construct
  source 1..21: mol_type = other RNA
  modified_base 1..21: mod_base = OTHER; note = position 1, 3, 5, 7, 9, 11, 13, 15, 17, 19-21 are 2-O-methyl modified nucleoside; 2, 4, 6, 8, 10, 12, 14, 16 and 18 are 2-fluoro modified nucleoside; 19-21 has phosphorothioate linkage
ttcgtgcggttgaagaagttt

SEQ ID NO: 4719 - RNA, 21 nt, synthetic construct
  source 1..21: mol_type = other RNA
  modified_base 1..21: mod_base = OTHER; note = position 1, 3, 5, 7, 9, 11, 13, 15, 17, 19-21 are 2-O-methyl modified nucleoside; 2, 4, 6, 8, 10, 12, 14, 16 and 18 are 2-fluoro modified nucleoside; 19-21 has phosphorothioate linkage
ttcgtgcggttgaagaagttt

SEQ ID NO: 4720 - RNA, 21 nt, synthetic construct
  source 1..21: mol_type = other RNA
  modified_base 1..21: mod_base = OTHER; note = position 1, 3, 5, 7, 9, 11, 13, 15, 17, 19-21 are 2-O-methyl modified nucleoside; 2, 4, 6, 8, 10, 12, 14, 16 and 18 are 2-fluoro modified nucleoside; 19-21 has phosphorothioate linkage
tgtacttctcgatgccgaatt

SEQ ID NO: 4721 - RNA, 21 nt, synthetic construct
  source 1..21: mol_type = other RNA
  modified_base 1..21: mod_base = OTHER; note = position 1, 3, 5, 7, 9, 11, 13, 15, 17, 19-21 are 2-O-methyl modified nucleoside; 2, 4, 6, 8, 10, 12, 14, 16 and 18 are 2-fluoro modified nucleoside; 19-21 has phosphorothioate linkage
tcgggatgtacttctcgattt

SEQ ID NO: 4722 - RNA, 21 nt, synthetic construct
  source 1..21: mol_type = other RNA
  modified_base 1..21: mod_base = OTHER; note = position 1, 3, 5, 7, 9, 11, 13, 15, 17, 19-21 are 2-O-methyl modified nucleoside; 2, 4, 6, 8, 10, 12, 14, 16 and 18 are 2-fluoro modified nucleoside; 19-21 has phosphorothioate linkage
tcgggatgtacttctcgattt

SEQ ID NO: 4723 - RNA, 21 nt, synthetic construct
  source 1..21: mol_type = other RNA
  modified_base 1..21: mod_base = OTHER; note = position 1, 3, 5, 7, 9, 11, 13, 15, 17, 19-21 are 2-O-methyl modified nucleoside; 2, 4, 6, 8, 10, 12, 14, 16 and 18 are 2-fluoro modified nucleoside; 19-21 has phosphorothioate linkage
tcgggatgtacttctcgattt

SEQ ID NO: 4724 - RNA, 21 nt, synthetic construct
  source 1..21: mol_type = other RNA
  modified_base 1..21: mod_base = OTHER; note = position 1, 3, 5, 7, 9, 11, 13, 15, 17, 19-21 are 2-O-methyl modified nucleoside; 2, 4, 6, 8, 10, 12, 14, 16 and 18 are 2-fluoro modified nucleoside; 19-21 has phosphorothioate linkage
tcgggatgtacttctcgattt

SEQ ID NO: 4725 - RNA, 21 nt, synthetic construct
  source 1..21: mol_type = other RNA
  modified_base 1..21: mod_base = OTHER; note = position 1, 3, 5, 7, 9, 11, 13, 15, 17, 19-21 are 2-O-methyl modified nucleoside; 2, 4, 6, 8, 10, 12, 14, 16 and 18 are 2-fluoro modified nucleoside; 19-21 has phosphorothioate linkage
tcgggatgtacttctcgattt

SEQ ID NO: 4726 - RNA, 21 nt, synthetic construct
  source 1..21: mol_type = other RNA
  modified_base 1..21: mod_base = OTHER; note = position 1, 3, 5, 7, 9, 11, 13, 15, 17, 19-21 are 2-O-methyl modified nucleoside; 2, 4, 6, 8, 10, 12, 14, 16 and 18 are 2-fluoro modified nucleoside; 19-21 has phosphorothioate linkage
tcgggatgtacttctcgattt

SEQ ID NO: 4727 - RNA, 21 nt, synthetic construct
  source 1..21: mol_type = other RNA
  modified_base 1..21: mod_base = OTHER; note = position 1, 3, 5, 7, 9, 11, 13, 15, 17, 19-21 are 2-O-methyl modified nucleoside; 2, 4, 6, 8, 10, 12, 14, 16 and 18 are 2-fluoro modified nucleoside; 19-21 has phosphorothioate linkage
tcgggatgtacttctcgattt

SEQ ID NO: 4728 - RNA, 21 nt, synthetic construct
  source 1..21: mol_type = other RNA
  modified_base 1..21: mod_base = OTHER; note = position 1, 3, 5, 7, 9, 11, 13, 15, 17, 19-21 are 2-O-methyl modified nucleoside; 2, 4, 6, 8, 10, 12, 14, 16 and 18 are 2-fluoro modified nucleoside; 19-21 has phosphorothioate linkage
tcgggatgtacttctcgattt

SEQ ID NO: 4729 - RNA, 21 nt, synthetic construct
  source 1..21: mol_type = other RNA
  modified_base 1..21: mod_base = OTHER; note = position 1, 3, 5, 7, 9, 11, 13, 15, 17, 19-21 are 2-O-methyl modified nucleoside; 2, 4, 6, 8, 10, 12, 14, 16 and 18 are 2-fluoro modified nucleoside; 19-21 has phosphorothioate linkage
tcgggatgtacttctcgattt

SEQ ID NO: 4730 - RNA, 21 nt, synthetic construct
  source 1..21: mol_type = other RNA
  modified_base 1..21: mod_base = OTHER; note = position 1, 3, 5, 7, 9, 11, 13, 15, 17, 19-21 are 2-O-methyl modified nucleoside; 2, 4, 6, 8, 10, 12, 14, 16 and 18 are 2-fluoro modified nucleoside; 19-21 has phosphorothioate linkage
tcgggatgtacttctcgattt

SEQ ID NO: 4731 - RNA, 21 nt, synthetic construct
  source 1..21: mol_type = other RNA
  modified_base 1..21: mod_base = OTHER; note = position 1, 3, 5, 7, 9, 11, 13, 15, 17, 19-21 are 2-O-methyl modified nucleoside; 2, 4, 6, 8, 10, 12, 14, 16 and 18 are 2-fluoro modified nucleoside; 19-21 has phosphorothioate linkage
tcgggatgtacttctcgattt

SEQ ID NO: 4732 - RNA, 21 nt, synthetic construct
  source 1..21: mol_type = other RNA
  modified_base 1..21: mod_base = OTHER; note = position 1, 3, 5, 7, 9, 11, 13, 15, 17, 19-21 are 2-O-methyl modified nucleoside; 2, 4, 6, 8, 10, 12, 14, 16 and 18 are 2-fluoro modified nucleoside; 19-21 has phosphorothioate linkage
tcgggatgtacttctcgattt

SEQ ID NO: 4733 - RNA, 21 nt, synthetic construct
  source 1..21: mol_type = other RNA
  modified_base 1..21: mod_base = OTHER; note = position 1, 3, 5, 7, 9, 11, 13, 15, 17, 19-21 are 2-O-methyl modified nucleoside; 2, 4, 6, 8, 10, 12, 14, 16 and 18 are 2-fluoro modified nucleoside; 19-21 has phosphorothioate linkage
tcgggatgtacttctcgattt

SEQ ID NO: 4734 - RNA, 21 nt, synthetic construct
  source 1..21: mol_type = other RNA
  modified_base 1..21: mod_base = OTHER; note = position 1, 3, 5, 7, 9, 11, 13, 15, 17, 19-21 are 2-O-methyl modified nucleoside; 2, 4, 6, 8, 10, 12, 14, 16 and 18 are 2-fluoro modified nucleoside; 19-21 has phosphorothioate linkage
tcgggatgtacttctcgattt

SEQ ID NO: 4735 - RNA, 21 nt, synthetic construct
  source 1..21: mol_type = other RNA
  modified_base 1..21: mod_base = OTHER; note = position 1, 3, 5, 7, 9, 11, 13, 15, 17, 19-21 are 2-O-methyl modified nucleoside; 2, 4, 6, 8, 10, 12, 14, 16 and 18 are 2-fluoro modified nucleoside; 19-21 has phosphorothioate linkage
tcgggatgtacttctcgattt

SEQ ID NO: 4736 - RNA, 21 nt, synthetic construct
  source 1..21: mol_type = other RNA
  modified_base 1..21: mod_base = OTHER; note = position 1, 3, 5, 7, 9, 11, 13, 15, 17, 19-21 are 2-O-methyl modified nucleoside; 2, 4, 6, 8, 10, 12, 14, 16 and 18 are 2-fluoro modified nucleoside; 19-21 has phosphorothioate linkage
tcgggatgtacttctcgattt

SEQ ID NO: 4737 - RNA, 21 nt, synthetic construct
  source 1..21: mol_type = other RNA
  modified_base 1..21: mod_base = OTHER; note = position 1, 3, 5, 7, 9, 11, 13, 15, 17, 19-21 are 2-O-methyl modified nucleoside; 2, 4, 6, 8, 10, 12, 14, 16 and 18 are 2-fluoro modified nucleoside; 19-21 has phosphorothioate linkage
tcgggatgtacttctcgattt

SEQ ID NO: 4738 - RNA, 21 nt, synthetic construct
  source 1..21: mol_type = other RNA
  modified_base 1..21: mod_base = OTHER; note = position 1, 3, 5, 7, 9, 11, 13, 15, 17, 19-21 are 2-O-methyl modified nucleoside; 2, 4, 6, 8, 10, 12, 14, 16 and 18 are 2-fluoro modified nucleoside; 19-21 has phosphorothioate linkage
tcgggatgtacttctcgattt

SEQ ID NO: 4739 - RNA, 21 nt, synthetic construct
  source 1..21: mol_type = other RNA
  modified_base 1..21: mod_base = OTHER; note = position 1, 3, 5, 7, 9, 11, 13, 15, 17, 19-21 are 2-O-methyl modified nucleoside; 2, 4, 6, 8, 10, 12, 14, 16 and 18 are 2-fluoro modified nucleoside; 19-21 has phosphorothioate linkage
tcgggatgtacttctcgattt

SEQ ID NO: 4740 - RNA, 21 nt, synthetic construct
  source 1..21: mol_type = other RNA
  modified_base 1..21: mod_base = OTHER; note = position 1, 3, 5, 7, 9, 11, 13, 15, 17, 19-21 are 2-O-methyl modified nucleoside; 2, 4, 6, 8, 10, 12, 14, 16 and 18 are 2-fluoro modified nucleoside; 19-21 has phosphorothioate linkage
tacgggatgtacttctcgatt

SEQ ID NO: 4741 - RNA, 21 nt, synthetic construct
  source 1..21: mol_type = other RNA
  modified_base 1..21: mod_base = OTHER; note = position 1, 3, 5, 7, 9, 11, 13, 15, 17, 19-21 are 2-O-methyl modified nucleoside; 2, 4, 6, 8, 10, 12, 14, 16 and 18 are 2-fluoro modified nucleoside; 19-21 has phosphorothioate linkage
tacgggatgtacttctcgatt

SEQ ID NO: 4742 - RNA, 21 nt, synthetic construct
  source 1..21: mol_type = other RNA
  modified_base 1..21: mod_base = OTHER; note = position 1, 3, 5, 7, 9, 11, 13, 15, 17, 19-21 are 2-O-methyl modified nucleoside; 2, 4, 6, 8, 10, 12, 14, 16 and 18 are 2-fluoro modified nucleoside; 19-21 has phosphorothioate linkage
tgtgtacgggatgtacttctt

SEQ ID NO: 4743 - RNA, 21 nt, synthetic construct
  source 1..21: mol_type = other RNA
  modified_base 1..21: mod_base = OTHER; note = position 1, 3, 5, 7, 9, 11, 13, 15, 17, 19-21 are 2-O-methyl modified nucleoside; 2, 4, 6, 8, 10, 12, 14, 16 and 18 are 2-fluoro modified nucleoside; 19-21 has phosphorothioate linkage
tgtgtacgggatgtacttctt

SEQ ID NO: 4744 - RNA, 21 nt, synthetic construct
  source 1..21: mol_type = other RNA
  modified_base 1..21: mod_base = OTHER; note = position 1, 3, 5, 7, 9, 11, 13, 15, 17, 19-21 are 2-O-methyl modified nucleoside; 2, 4, 6, 8, 10, 12, 14, 16 and 18 are 2-fluoro modified nucleoside; 19-21 has phosphorothioate linkage
tgtgtacgggatgtacttctt

SEQ ID NO: 4745 - RNA, 21 nt, synthetic construct
  source 1..21: mol_type = other RNA
  modified_base 1..21: mod_base = OTHER; note = position 1, 3, 5, 7, 9, 11, 13, 15, 17, 19-21 are 2-O-methyl modified nucleoside; 2, 4, 6, 8, 10, 12, 14, 16 and 18 are 2-fluoro modified nucleoside; 19-21 has phosphorothioate linkage
tgtgtacgggatgtacttctt

SEQ ID NO: 4746 - RNA, 21 nt, synthetic construct
  source 1..21: mol_type = other RNA
  modified_base 1..21: mod_base = OTHER; note = position 1, 3, 5, 7, 9, 11, 13, 15, 17, 19-21 are 2-O-methyl modified nucleoside; 2, 4, 6, 8, 10, 12, 14, 16 and 18 are 2-fluoro modified nucleoside; 19-21 has phosphorothioate linkage
tgtgtacgggatgtacttctt

SEQ ID NO: 4747 - RNA, 21 nt, synthetic construct
  source 1..21: mol_type = other RNA
  modified_base 1..21: mod_base = OTHER; note = position 1, 3, 5, 7, 9, 11, 13, 15, 17, 19-21 are 2-O-methyl modified nucleoside; 2, 4, 6, 8, 10, 12, 14, 16 and 18 are 2-fluoro modified nucleoside; 19-21 has phosphorothioate linkage
tgtgtacgggatgtacttctt

SEQ ID NO: 4748 - RNA, 21 nt, synthetic construct
  source 1..21: mol_type = other RNA
  modified_base 1..21: mod_base = OTHER; note = position 1, 3, 5, 7, 9, 11, 13, 15, 17, 19-21 are 2-O-methyl modified nucleoside; 2, 4, 6, 8, 10, 12, 14, 16 and 18 are 2-fluoro modified nucleoside; 19-21 has phosphorothioate linkage
tgtgtacgggatgtacttctt

SEQ ID NO: 4749 - RNA, 21 nt, synthetic construct
  source 1..21: mol_type = other RNA
  modified_base 1..21: mod_base = OTHER; note = position 1, 3, 5, 7, 9, 11, 13, 15, 17, 19-21 are 2-O-methyl modified nucleoside; 2, 4, 6, 8, 10, 12, 14, 16 and 18 are 2-fluoro modified nucleoside; 19-21 has phosphorothioate linkage
tgacttgcagtcgaagtagtt

SEQ ID NO: 4750 - RNA, 21 nt, synthetic construct
  source 1..21: mol_type = other RNA
  modified_base 1..21: mod_base = OTHER; note = position 1, 3, 5, 7, 9, 11, 13, 15, 17, 19-21 are 2-O-methyl modified nucleoside; 2, 4, 6, 8, 10, 12, 14, 16 and 18 are 2-fluoro modified nucleoside; 19-21 has phosphorothioate linkage
tgacttgcagtcgaagtagtt

SEQ ID NO: 4751 - RNA, 21 nt, synthetic construct
  source 1..21: mol_type = other RNA
  modified_base 1..21: mod_base = OTHER; note = position 1, 3, 5, 7, 9, 11, 13, 15, 17, 19-21 are 2-O-methyl modified nucleoside; 2, 4, 6, 8, 10, 12, 14, 16 and 18 are 2-fluoro modified nucleoside; 19-21 has phosphorothioate linkage
tcggacttgcagtcgaagttt

SEQ ID NO: 4752 - RNA, 21 nt, synthetic construct
  source 1..21: mol_type = other RNA
  modified_base 1..21: mod_base = OTHER; note = position 1, 3, 5, 7, 9, 11, 13, 15, 17, 19-21 are 2-O-methyl modified nucleoside; 2, 4, 6, 8, 10, 12, 14, 16 and 18 are 2-fluoro modified nucleoside; 19-21 has phosphorothioate linkage
tcggacttgcagtcgaagttt

SEQ ID NO: 4753 - RNA, 21 nt, synthetic construct
  source 1..21: mol_type = other RNA
  modified_base 1..21: mod_base = OTHER; note = position 1, 3, 5, 7, 9, 11, 13, 15, 17, 19-21 are 2-O-methyl modified nucleoside; 2, 4, 6, 8, 10, 12, 14, 16 and 18 are 2-fluoro modified nucleoside; 19-21 has phosphorothioate linkage
tcggacttgcagtcgaagttt

SEQ ID NO: 4754 - RNA, 21 nt, synthetic construct
  source 1..21: mol_type = other RNA
  modified_base 1..21: mod_base = OTHER; note = position 1, 3, 5, 7, 9, 11, 13, 15, 17, 19-21 are 2-O-methyl modified nucleoside; 2, 4, 6, 8, 10, 12, 14, 16 and 18 are 2-fluoro modified nucleoside; 19-21 has phosphorothioate linkage
tcggacttgcagtcgaagttt

SEQ ID NO: 4755 - RNA, 21 nt, synthetic construct
  source 1..21: mol_type = other RNA
  modified_base 1..21: mod_base = OTHER; note = position 1, 3, 5, 7, 9, 11, 13, 15, 17, 19-21 are 2-O-methyl modified nucleoside; 2, 4, 6, 8, 10, 12, 14, 16 and 18 are 2-fluoro modified nucleoside; 19-21 has phosphorothioate linkage
tatgatgccgtagaggtaatt

SEQ ID NO: 4756 - RNA, 21 nt, synthetic construct
  source 1..21: mol_type = other RNA
  modified_base 1..21: mod_base = OTHER; note = position 1, 3, 5, 7, 9, 11, 13, 15, 17, 19-21 are 2-O-methyl modified nucleoside; 2, 4, 6, 8, 10, 12, 14, 16 and 18 are 2-fluoro modified nucleoside; 19-21 has phosphorothioate linkage
tatgatgccgtagaggtaatt

SEQ ID NO: 4757 - RNA, 19 nt, synthetic construct
  source 1..19: mol_type = other RNA
aacctaatgccacagcgaa

SEQ ID NO: 4758 - RNA, 19 nt, synthetic construct
  source 1..19: mol_type = other RNA
actatcctggtgacctcta

SEQ ID NO: 4759 - RNA, 19 nt, synthetic construct
  source 1..19: mol_type = other RNA
tggtgtgccacaactcaca

SEQ ID NO: 4760 - RNA, 19 nt, synthetic construct
  source 1..19: mol_type = other RNA
tgtgccacaactcacaaca

SEQ ID NO: 4761 - RNA, 19 nt, synthetic construct
  source 1..19: mol_type = other RNA
acaactcacaactacgaca

SEQ ID NO: 4762 - RNA, 19 nt, synthetic construct
  source 1..19: mol_type = other RNA
aactcacaactacgaccga

SEQ ID NO: 4763 - RNA, 19 nt, synthetic construct
  source 1..19: mol_type = other RNA
tcacaactacgaccgggaa

SEQ ID NO: 4764 - RNA, 19 nt, synthetic construct
  source 1..19: mol_type = other RNA
agaagaggacgttcctgca

SEQ ID NO: 4765 - RNA, 19 nt, synthetic construct
  source 1..19: mol_type = other RNA
agcacttcttcaaccgcaa

SEQ ID NO: 4766 - RNA, 19 nt, synthetic construct
  source 1..19: mol_type = other RNA
cacttcttcaaccgcacga

SEQ ID NO: 4767 - RNA, 19 nt, synthetic construct
  source 1..19: mol_type = other RNA
acttcttcaaccgcacgaa

SEQ ID NO: 4768 - RNA, 19 nt, synthetic construct
  source 1..19: mol_type = other RNA
cttcttcaaccgcacgaca

SEQ ID NO: 4769 - RNA, 19 nt, synthetic construct
  source 1..19: mol_type = other RNA
ttcttcaaccgcacgacga

SEQ ID NO: 4770 - RNA, 19 nt, synthetic construct
  source 1..19: mol_type = other RNA
tcttcaaccgcacgacgga

SEQ ID NO: 4771 - RNA, 19 nt, synthetic construct
  source 1..19: mol_type = other RNA
ttcggcatcgagaagtaca

SEQ ID NO: 4772 - RNA, 19 nt, synthetic construct
  source 1..19: mol_type = other RNA
atcgagaagtacatcccga

SEQ ID NO: 4773 - RNA, 19 nt, synthetic construct
  source 1..19: mol_type = other RNA
tcgagaagtacatcccgta

SEQ ID NO: 4774 - RNA, 19 nt, synthetic construct
  source 1..19: mol_type = other RNA
gaagtacatcccgtacaca

SEQ ID NO: 4775 - RNA, 19 nt, synthetic construct
  source 1..19: mol_type = other RNA
tctgtgccggctacttcga

SEQ ID NO: 4776 - RNA, 19 nt, synthetic construct
  source 1..19: mol_type = other RNA
ctacttcgactgcaagtca

SEQ ID NO: 4777 - RNA, 19 nt, synthetic construct
  source 1..19: mol_type = other RNA
acttcgactgcaagtccga

SEQ ID NO: 4778 - RNA, 19 nt, synthetic construct
  source 1..19: mol_type = other RNA
ttcgactgcaagtccgaca

SEQ ID NO: 4779 - RNA, 19 nt, synthetic construct
  source 1..19: mol_type = other RNA
ttacctctacggcatcata

SEQ ID NO: 4780 - RNA, 19 nt, synthetic construct
  source 1..19: mol_type = other RNA
ttcgctgtggcattaggtt

SEQ ID NO: 4781 - RNA, 19 nt, synthetic construct
  source 1..19: mol_type = other RNA
tagaggtcaccaggatagt

SEQ ID NO: 4782 - RNA, 19 nt, synthetic construct
  source 1..19: mol_type = other RNA
tgtgagttgtggcacacca

SEQ ID NO: 4783 - RNA, 19 nt, synthetic construct
  source 1..19: mol_type = other RNA
tgttgtgagttgtggcaca

SEQ ID NO: 4784 - RNA, 19 nt, synthetic construct
  source 1..19: mol_type = other RNA
tgtcgtagttgtgagttgt

SEQ ID NO: 4785 - RNA, 19 nt, synthetic construct
  source 1..19: mol_type = other RNA
tcggtcgtagttgtgagtt

SEQ ID NO: 4786 - RNA, 19 nt, synthetic construct
  source 1..19: mol_type = other RNA
ttcccggtcgtagttgtga

SEQ ID NO: 4787 - RNA, 19 nt, synthetic construct
  source 1..19: mol_type = other RNA
tgcaggaacgtcctcttct

SEQ ID NO: 4788 - RNA, 19 nt, synthetic construct
  source 1..19: mol_type = other RNA
ttgcggttgaagaagtgct

SEQ ID NO: 4789 - RNA, 19 nt, synthetic construct
  source 1..19: mol_type = other RNA
tcgtgcggttgaagaagtg

SEQ ID NO: 4790 - RNA, 19 nt, synthetic construct
  source 1..19: mol_type = other RNA
ttcgtgcggttgaagaagt

SEQ ID NO: 4791 - RNA, 19 nt, synthetic construct
  source 1..19: mol_type = other RNA
tgtcgtgcggttgaagaag

SEQ ID NO: 4792 - RNA, 19 nt, synthetic construct
  source 1..19: mol_type = other RNA
tcgtcgtgcggttgaagaa

SEQ ID NO: 4793 - RNA, 19 nt, synthetic construct
  source 1..19: mol_type = other RNA
tccgtcgtgcggttgaaga

SEQ ID NO: 4794 - RNA, 19 nt, synthetic construct
  source 1..19: mol_type = other RNA
tgtacttctcgatgccgaa

SEQ ID NO: 4795 - RNA, 19 nt, synthetic construct
  source 1..19: mol_type = other RNA
tcgggatgtacttctcgat

SEQ ID NO: 4796 - RNA, 19 nt, synthetic construct
  source 1..19: mol_type = other RNA
tacgggatgtacttctcga

SEQ ID NO: 4797 - RNA, 19 nt, synthetic construct
  source 1..19: mol_type = other RNA
tgtgtacgggatgtacttc

SEQ ID NO: 4798 - RNA, 19 nt, synthetic construct
  source 1..19: mol_type = other RNA
tcgaagtagccggcacaga

SEQ ID NO: 4799 - RNA, 19 nt, synthetic construct
  source 1..19: mol_type = other RNA
tgacttgcagtcgaagtag

SEQ ID NO: 4800 - RNA, 19 nt, synthetic construct
  source 1..19: mol_type = other RNA
tcggacttgcagtcgaagt

SEQ ID NO: 4801 - RNA, 19 nt, synthetic construct
  source 1..19: mol_type = other RNA
tgtcggacttgcagtcgaa

SEQ ID NO: 4802 - RNA, 19 nt, synthetic construct
  source 1..19: mol_type = other RNA
tatgatgccgtagaggtaa

SEQ ID NO: 4803 - RNA, 2069 nt, synthetic construct
  source 1..2069: mol_type = other RNA
gcctcccactgcccctcaggccagctcaggagccatggggcgctgggcctgggtccccagcccctggcccccaccggggctgggccccttcctcctcctcctcctgctgctgctgctgctgccacgggggttccagccccagcctggcgggaaccgtacggagtccccagaacctaatgccacagcgacccctgcgatccccactatcctggtgacctctgtgacctctgagaccccagcaacaagtgctccagaggcagagggaccccaaagtggggggctcccgcccccgcccagggcagttccctcgagcagtagcccccaggcccaagcactcaccgaggacgggaggccctgcaggttccccttccgctacgggggccgcatgctgcatgcctgcacttcggagggcagtgcacacaggaagtggtgtgccacaactcacaactacgaccgggacagggcctggggctactgtgtggaggccaccccgcctccagggggcccagctgccctggatccctgtgcctccggcccctgcctcaatggaggctcctgctccaatacccaggacccccagtcctatcactgcagctgcccccgggccttcaccggcaaggactgcggcacagagaaatgctttgatgagacccgctacgagtacctggaggggggcgaccgctgggcccgcgtgcgccagggccacgtggaacagtgcgagtgcttcgggggccggacctggtgcgaaggcacccgacatacagcttgtctgagcagcccttgcctgaacgggggcacctgccacctgatcgtggccaccgggaccaccgtgtgtgcctgcccaccaggcttcgctggacggctctgcaacatcgagcctgatgagcgctgcttcttggggaacggcactgggtaccgtggcgtggccagcacctcagcctcgggcctcagctgcctggcctggaactccgatctgctctaccaggagctgcacgtggactccgtgggcgccgcggccctgctgggcctgggcccccatgcctactgccggaatccggacaatgacgagaggccctggtgctacgtggtgaaggacagcgcgctctcctgggagtactgccgcctggaggcctgcgaatccctcaccagagtccaactgtcaccggatctcctggcgaccctgcctgagccagcctccccggggcgccaggcctgcggcaggaggcacaagaagaggacgttcctgcggccacgtatcatcggcggctcctcctcgctgcccggctcgcacccctggctggccgccatctacatcggggacagcttctgcgccgggagcctggtccacacctgctgggtggtgtcggccgcccactgcttctcccacagcccccccagggacagcgtctccgtggtgctgggccagcacttcttcaaccgcacgacggacgtgacgcagaccttcggcatcgagaagtacatcccgtacaccctgtactcggtgttcaaccccagcgaccacgacctcgtcctgatccggctgaagaagaaaggggaccgctgtgccacacgctcgcagttcgtgcagcccatctgcctgcccgagcccggcagcaccttccccgcaggacacaagtgccagattgcgggctggggccacttggatgagaacgtgagcggctactccagctccctgcgggaggccctggtccccctggtcgccgaccacaagtgcagcagccctgaggtctacggcgccgacatcagccccaacatgctctgtgccggctacttcgactgcaagtccgacgcctgccagggggactcaggggggcccctggcctgcgagaagaacggcgtggcttacctctacggcatcatcagctggggtgacggctgcgggcggctccacaagccgggggtctacacccgcgtggccaactatgtggactggatcaacgaccggatacggcctcccaggcggcttgtggctccctcctgaccctccagcgggacaccctggttcccaccattccctgccttgctgacaataaagatatttccaagaa

SEQ ID NO: 4804 - RNA, 21 nt, synthetic construct
  source 1..21: mol_type = other RNA; note = ETL17 GalNac Moiety
  modified_base 4: mod_base = OTHER; note = 2-methoxy ethyl nucleoside
  modified_base 7: mod_base = OTHER; note = 2-fluoro-modified nucleoside
  modified_base 8: mod_base = OTHER; note = 2-fluoro-modified nucleoside
  modified_base 9: mod_base = OTHER; note = 2-fluoro-modified nucleoside
  modified_base 10: mod_base = OTHER; note = 2-fluoro-modified nucleoside
  modified_base 1: mod_base = OTHER; note = 2-O-methyl modified nucleoside
  modified_base 19^20: mod_base = OTHER; note = phosphorothioate linkage
  modified_base 20^21: mod_base = OTHER; note = phosphorothioate linkage
  modified_base 2: mod_base = OTHER; note = 2-O-methyl modified nucleoside
  modified_base 3: mod_base = OTHER; note = 2-O-methyl modified nucleoside
  modified_base 19: mod_base = OTHER; note = 2-O-methyl modified nucleoside
  modified_base 20: mod_base = OTHER; note = 2-O-methyl modified nucleoside
  modified_base 21: mod_base = OTHER; note = 2-O-methyl modified nucleoside
  modified_base 15: mod_base = OTHER; note = 2-O-methyl modified nucleoside
  modified_base 16: mod_base = OTHER; note = 2-O-methyl modified nucleoside
  modified_base 17: mod_base = OTHER; note = 2-O-methyl modified nucleoside
  modified_base 6: mod_base = OTHER; note = note = 2-fluoro-modified nucleoside
ctatgtggactggatcaaatt

SEQ ID NO: 4805 - RNA, 21 nt, synthetic construct
  source 1..21: mol_type = other RNA; note = ETL17 GalNac Moiety
  modified_base 6..9: mod_base = OTHER; note = 2-fluoro-modified nucleoside
  modified_base 1..3: mod_base = OTHER; note = 2-O-methyl modified nucleoside
  modified_base 20^21: mod_base = OTHER; note = phosphorothioate linkage
  modified_base 19^20: mod_base = OTHER; note = phosphorothioate linkage
  modified_base 4: mod_base = OTHER; note = 2' methoxy ethyl modified nucleoside
  modified_base 13: mod_base = OTHER; note = 2' methoxy ethyl modified nucleoside
  modified_base 5: mod_base = OTHER; note = 2-O-methyl modified nucleoside
  modified_base 10..21: mod_base = OTHER; note = 2-O-methyl modified nucleoside
ctatgtggactggatcaaatt

SEQ ID NO: 4806 - RNA, 21 nt, synthetic construct
  source 1..21: mol_type = other RNA; note = ETL17 GalNac Moiety
  modified_base 5: mod_base = OTHER; note = 2-fluoro-modified nucleoside
  modified_base 19^20: mod_base = OTHER; note = phosphorothioate linkage
  modified_base 20^21: mod_base = OTHER; note = phosphorothioate linkage
  modified_base 1..3: mod_base = OTHER; note = 2-O-methyl modified nucleoside
  modified_base 5: mod_base = OTHER; note = 2-O-methyl modified nucleoside
  modified_base 10..21: mod_base = OTHER; note = 2-O-methyl modified nucleoside
  modified_base 7: mod_base = OTHER; note = 2-fluoro-modified nucleoside
  modified_base 9: mod_base = OTHER; note = 2-fluoro-modified nucleoside
ctatgtggactggatcaaatt

SEQ ID NO: 4807 - RNA, 21 nt, synthetic construct
  source 1..21: mol_type = other RNA; note = ETL17 GalNac Moiety
  modified_base 5: mod_base = OTHER; note = 2-fluoro-modified nucleoside
  modified_base 7: mod_base = OTHER; note = 2-fluoro-modified nucleoside
  modified_base 9: mod_base = OTHER; note = 2-fluoro-modified nucleoside
  modified_base 19^20: mod_base = OTHER; note = phosphorothioate linkage
  modified_base 20^21: mod_base = OTHER; note = phosphorothioate linkage
  modified_base 1..4: mod_base = OTHER; note = 2-O-methyl modified nucleoside
  modified_base 8: mod_base = OTHER; note = 2-O-methyl modified nucleoside
  modified_base 10..21: mod_base = OTHER; note = 2-O-methyl modified nucleoside
  modified_base 6: mod_base = OTHER; note = 2-O-methyl modified nucleoside
ctatgtggactggatcaaatt

SEQ ID NO: 4808 - RNA, 21 nt, synthetic construct
  source 1..21: mol_type = other RNA; note = ETL17 GalNac Moiety
  modified_base 5: mod_base = OTHER; note = 2-fluoro-modified nucleoside
  modified_base 7: mod_base = OTHER; note = 2-fluoro-modified nucleoside
  modified_base 9: mod_base = OTHER; note = 2-fluoro-modified nucleoside
  modified_base 19^20: mod_base = OTHER; note = phosphorothioate linkage
  modified_base 20^21: mod_base = OTHER; note = phosphorothioate linkage
  modified_base 6: mod_base = OTHER; note = 2-O-methyl modified nucleoside
  modified_base 8: mod_base = OTHER; note = 2-O-methyl modified nucleoside
  modified_base 1..4: mod_base = OTHER; note = 2-O-methyl modified nucleoside
  modified_base 10..21: mod_base = OTHER; note = 2-O-methyl modified nucleoside
ctatgtggactggatcaaatt

SEQ ID NO: 4809 - RNA, 21 nt, synthetic construct
  source 1..21: mol_type = other RNA; note = ETL17 GalNac Moiety
  modified_base 5: mod_base = OTHER; note = 2-fluoro-modified nucleoside
  modified_base 7: mod_base = OTHER; note = 2-fluoro-modified nucleoside
  modified_base 9: mod_base = OTHER; note = 2-fluoro-modified nucleoside
  modified_base 19^20: mod_base = OTHER; note = phosphorothioate linkage
  modified_base 20^21: mod_base = OTHER; note = phosphorothioate linkage
  modified_base 1..4: mod_base = OTHER; note = 2-O-methyl modified nucleoside
  modified_base 6: mod_base = OTHER; note = 2-O-methyl modified nucleoside
  modified_base 8: mod_base = OTHER; note = 2-O-methyl modified nucleoside
  modified_base 10..21: mod_base = OTHER; note = 2-O-methyl modified nucleoside
ctatgtggactggatcaaatt

SEQ ID NO: 4810 - RNA, 21 nt, synthetic construct
  source 1..21: mol_type = other RNA; note = ETL17 GalNac Moiety
  modified_base 5: mod_base = OTHER; note = 2-fluoro-modified nucleoside
  modified_base 7: mod_base = OTHER; note = 2-fluoro-modified nucleoside
  modified_base 9: mod_base = OTHER; note = 2-fluoro-modified nucleoside
  modified_base 19^20: mod_base = OTHER; note = phosphorothioate linkage
  modified_base 20^21: mod_base = OTHER; note = phosphorothioate linkage
  modified_base 1..4: mod_base = OTHER; note = 2-O-methyl modified nucleoside
  modified_base 6: mod_base = OTHER; note = 2-O-methyl modified nucleoside
  modified_base 10..21: mod_base = OTHER; note = 2-O-methyl modified nucleoside
  modified_base 8: mod_base = OTHER; note = 2-O-methyl modified nucleoside
ctatgtggactggatcaaatt

SEQ ID NO: 4811 - RNA, 21 nt, synthetic construct
  source 1..21: mol_type = other RNA; note = ETL17 GalNac Moiety
  modified_base 5: mod_base = OTHER; note = 2-fluoro-modified nucleoside
  modified_base 7: mod_base = OTHER; note = 2-fluoro-modified nucleoside
  modified_base 9: mod_base = OTHER; note = 2-fluoro-modified nucleoside
  modified_base 19^20: mod_base = OTHER; note = phosphorothioate linkage
  modified_base 20^21: mod_base = OTHER; note = phosphorothioate linkage
  modified_base 8: mod_base = OTHER; note = 2-O-methyl modified nucleoside
  modified_base 6: mod_base = OTHER; note = 2-O-methyl modified nucleoside
  modified_base 1..4: mod_base = OTHER; note = 2-O-methyl modified nucleoside
  modified_base 10..21: mod_base = OTHER; note = 2-O-methyl modified nucleoside
ctatgtggactggatcaaatt

SEQ ID NO: 4812 - RNA, 21 nt, synthetic construct
  source 1..21: mol_type = other RNA; note = ETL17 GalNac Moiety
  modified_base 5: mod_base = OTHER; note = 2-fluoro-modified nucleoside
  modified_base 7: mod_base = OTHER; note = 2-fluoro-modified nucleoside
  modified_base 9: mod_base = OTHER; note = 2-fluoro-modified nucleoside
  modified_base 19^20: mod_base = OTHER; note = phosphorothioate linkage
  modified_base 20^21: mod_base = OTHER; note = phosphorothioate linkage
  modified_base 1..4: mod_base = OTHER; note = 2-O-methyl modified nucleoside
  modified_base 10..21: mod_base = OTHER; note = 2-O-methyl modified nucleoside
  modified_base 6: mod_base = OTHER; note = 2-O-methyl modified nucleoside
  modified_base 8: mod_base = OTHER; note = 2-O-methyl modified nucleoside
ctatgtggactggatcaaatt

SEQ ID NO: 4813 - RNA, 21 nt, synthetic construct
  source 1..21: mol_type = other RNA; note = ETL17 GalNac Moiety
  modified_base 5: mod_base = OTHER; note = 2-fluoro-modified nucleoside
  modified_base 19^20: mod_base = OTHER; note = phosphorothioate linkage
  modified_base 20^21: mod_base = OTHER; note = phosphorothioate linkage
  modified_base 9: mod_base = OTHER; note = 2-fluoro-modified nucleoside
  modified_base 7: mod_base = OTHER; note = 2-fluoro-modified nucleoside
  modified_base 8: mod_base = OTHER; note = 2-O-methyl modified nucleoside
  modified_base 10..21: mod_base = OTHER; note = 2-O-methyl modified nucleoside
  modified_base 6: mod_base = OTHER; note = 2-O-methyl modified nucleoside
  modified_base 1..4: mod_base = OTHER; note = 2-O-methyl modified nucleoside
ctatgtggactggatcaaatt

SEQ ID NO: 4814 - RNA, 21 nt, synthetic construct
  source 1..21: mol_type = other RNA
  modified_base 2: mod_base = OTHER; note = 2-fluoro-modified nucleoside
  modified_base 6: mod_base = OTHER; note = 2-fluoro-modified nucleoside
  modified_base 8: mod_base = OTHER; note = 2-fluoro-modified nucleoside
  modified_base 10: mod_base = OTHER; note = 2-fluoro-modified nucleoside
  modified_base 12: mod_base = OTHER; note = 2-fluoro-modified nucleoside
  modified_base 14: mod_base = OTHER; note = 2-fluoro-modified nucleoside
  modified_base 16: mod_base = OTHER; note = 2-fluoro-modified nucleoside
  modified_base 18: mod_base = OTHER; note = 2-fluoro-modified nucleoside
  modified_base 1^2: mod_base = OTHER; note = phosphorothioate linkage
  modified_base 2^3: mod_base = OTHER; note = phosphorothioate linkage
  modified_base 19^20: mod_base = OTHER; note = phosphorothioate linkage
  modified_base 20^21: mod_base = OTHER; note = phosphorothioate linkage
  modified_base 1: mod_base = OTHER; note = 2-O-methyl modified nucleoside
  modified_base 3: mod_base = OTHER; note = 2-O-methyl modified nucleoside
  modified_base 4: mod_base = OTHER; note = 2-O-methyl modified nucleoside
  modified_base 5: mod_base = OTHER; note = 2-O-methyl modified nucleoside
  modified_base 20: mod_base = OTHER; note = 2-O-methyl modified nucleoside
  modified_base 21: mod_base = OTHER; note = 2-O-methyl modified nucleoside
  modified_base 19: mod_base = OTHER; note = 2-O-methyl modified nucleoside
  modified_base 17: mod_base = OTHER; note = 2-O-methyl modified nucleoside
tttgatccagtccacatagtt

SEQ ID NO: 4815 - RNA, 21 nt, synthetic construct
  source 1..21: mol_type = other RNA
  modified_base 2: mod_base = OTHER; note = 2-fluoro-modified nucleoside
  modified_base 6: mod_base = OTHER; note = 2-fluoro-modified nucleoside
  modified_base 8: mod_base = OTHER; note = 2-fluoro-modified nucleoside
  modified_base 10: mod_base = OTHER; note = 2-fluoro-modified nucleoside
  modified_base 12: mod_base = OTHER; note = 2-O-methyl modified nucleoside
  modified_base 14: mod_base = OTHER; note = 2-fluoro-modified nucleoside
  modified_base 16: mod_base = OTHER; note = 2-fluoro-modified nucleoside
  modified_base 18: mod_base = OTHER; note = 2-fluoro-modified nucleoside
  modified_base 1^2: mod_base = OTHER; note = phosphorothioate linkage
  modified_base 2^3: mod_base = OTHER; note = phosphorothioate linkage
  modified_base 19^20: mod_base = OTHER; note = phosphorothioate linkage
  modified_base 20^21: mod_base = OTHER; note = phosphorothioate linkage
  modified_base 1: mod_base = OTHER; note = 2-O-methyl modified nucleoside
  modified_base 3: mod_base = OTHER; note = 2-O-methyl modified nucleoside
  modified_base 4: mod_base = OTHER; note = 2-O-methyl modified nucleoside
  modified_base 5: mod_base = OTHER; note = 2-O-methyl modified nucleoside
  modified_base 20: mod_base = OTHER; note = 2-O-methyl modified nucleoside
  modified_base 21: mod_base = OTHER; note = 2-O-methyl modified nucleoside
  modified_base 19: mod_base = OTHER; note = 2-O-methyl modified nucleoside
  modified_base 7: mod_base = OTHER; note = 2-O-methyl modified nucleoside
  modified_base 9: mod_base = OTHER; note = 2-O-methyl modified nucleoside
tttgatccagtccacatagtt

SEQ ID NO: 4816 - RNA, 21 nt, synthetic construct
  source 1..21: mol_type = other RNA
  modified_base 2: mod_base = OTHER; note = 2-fluoro-modified nucleoside
  modified_base 6: mod_base = OTHER; note = 2-fluoro-modified nucleoside
  modified_base 8: mod_base = OTHER; note = 2-fluoro-modified nucleoside
  modified_base 10: mod_base = OTHER; note = 2-O-methyl modified nucleoside
  modified_base 12: mod_base = OTHER; note = 2-O-methyl modified nucleoside
  modified_base 14: mod_base = OTHER; note = 2-fluoro-modified nucleoside
  modified_base 16: mod_base = OTHER; note = 2-fluoro-modified nucleoside
  modified_base 18: mod_base = OTHER; note = 2-fluoro-modified nucleoside
  modified_base 1^2: mod_base = OTHER; note = phosphorothioate linkage
  modified_base 2^3: mod_base = OTHER; note = phosphorothioate linkage
  modified_base 19^20: mod_base = OTHER; note = phosphorothioate linkage
  modified_base 20^21: mod_base = OTHER; note = phosphorothioate linkage
  modified_base 1: mod_base = OTHER; note = 2-O-methyl modified nucleoside
  modified_base 3: mod_base = OTHER; note = 2-O-methyl modified nucleoside
  modified_base 4: mod_base = OTHER; note = 2-O-methyl modified nucleoside
  modified_base 5: mod_base = OTHER; note = 2-O-methyl modified nucleoside
  modified_base 19: mod_base = OTHER; note = 2-O-methyl modified nucleoside
  modified_base 20: mod_base = OTHER; note = 2-O-methyl modified nucleoside
  modified_base 21: mod_base = OTHER; note = 2-O-methyl modified nucleoside
  modified_base 11: mod_base = OTHER; note = 2-O-methyl modified nucleoside
  modified_base 13: mod_base = OTHER; note = 2-O-methyl modified nucleoside
tttgatccagtccacatagtt

SEQ ID NO: 4817 - RNA, 21 nt, synthetic construct
  source 1..21: mol_type = other RNA
  modified_base 2: mod_base = OTHER; note = 2-fluoro-modified nucleoside
  modified_base 6: mod_base = OTHER; note = 2-fluoro-modified nucleoside
  modified_base 7: mod_base = OTHER; note = 2-fluoro-modified nucleoside
  modified_base 10: mod_base = OTHER; note = 2-fluoro-modified nucleoside
  modified_base 12: mod_base = OTHER; note = 2-fluoro-modified nucleoside
  modified_base 14: mod_base = OTHER; note = 2-fluoro-modified nucleoside
  modified_base 16: mod_base = OTHER; note = 2-fluoro-modified nucleoside
  modified_base 18: mod_base = OTHER; note = 2-fluoro-modified nucleoside
  modified_base 1^2: mod_base = OTHER; note = phosphorothioate linkage
  modified_base 2^3: mod_base = OTHER; note = phosphorothioate linkage
  modified_base 19^20: mod_base = OTHER; note = phosphorothioate linkage
  modified_base 20^21: mod_base = OTHER; note = phosphorothioate linkage
  modified_base 8: mod_base = OTHER; note = 2-O-methyl modified nucleoside
  modified_base 9: mod_base = OTHER; note = 2-O-methyl modified nucleoside
  modified_base 20: mod_base = OTHER; note = 2-O-methyl modified nucleoside
  modified_base 21: mod_base = OTHER; note = 2-O-methyl modified nucleoside
  modified_base 1: mod_base = OTHER; note = 2-O-methyl modified nucleoside
  modified_base 3: mod_base = OTHER; note = 2-O-methyl modified nucleoside
  modified_base 4: mod_base = OTHER; note = 2-O-methyl modified nucleoside
  modified_base 5: mod_base = OTHER; note = 2-O-methyl modified nucleoside
  modified_base 11: mod_base = OTHER; note = 2-O-methyl modified nucleoside
tttgatccagtccacatagtt

SEQ ID NO: 4818 - RNA, 21 nt, synthetic construct
  source 1..21: mol_type = other RNA
  modified_base 2: mod_base = OTHER; note = 2-fluoro-modified nucleoside
  modified_base 6: mod_base = OTHER; note = 2-fluoro-modified nucleoside
  modified_base 8: mod_base = OTHER; note = 2-O-methyl modified nucleoside
  modified_base 10: mod_base = OTHER; note = 2-fluoro-modified nucleoside
  modified_base 12: mod_base = OTHER; note = 2-fluoro-modified nucleoside
  modified_base 14: mod_base = OTHER; note = 2-fluoro-modified nucleoside
  modified_base 16: mod_base = OTHER; note = 2-fluoro-modified nucleoside
  modified_base 18: mod_base = OTHER; note = 2-fluoro-modified nucleoside
  modified_base 1^2: mod_base = OTHER; note = phosphorothioate linkage
  modified_base 2^3: mod_base = OTHER; note = phosphorothioate linkage
  modified_base 19^20: mod_base = OTHER; note = phosphorothioate linkage
  modified_base 20^21: mod_base = OTHER; note = phosphorothioate linkage
  modified_base 20: mod_base = OTHER; note = 2-O-methyl modified nucleoside
  modified_base 21: mod_base = OTHER; note = 2-O-methyl modified nucleoside
  modified_base 17: mod_base = OTHER; note = 2-O-methyl modified nucleoside
  modified_base 19: mod_base = OTHER; note = 2-O-methyl modified nucleoside
  modified_base 1: mod_base = OTHER; note = 2-O-methyl modified nucleoside
  modified_base 3: mod_base = OTHER; note = 2-O-methyl modified nucleoside
  modified_base 4: mod_base = OTHER; note = 2-O-methyl modified nucleoside
  modified_base 5: mod_base = OTHER; note = 2-O-methyl modified nucleoside
  modified_base 11: mod_base = OTHER; note = 2-O-methyl modified nucleoside
tttgatccagtccacatagtt

SEQ ID NO: 4819 - RNA, 21 nt, synthetic construct
  source 1..21: mol_type = other RNA
  modified_base 2: mod_base = OTHER; note = 2-fluoro-modified nucleoside
  modified_base 6: mod_base = OTHER; note = 2-fluoro-modified nucleoside
  modified_base 8: mod_base = OTHER; note = 2-O-methyl modified nucleoside
  modified_base 10: mod_base = OTHER; note = 2-fluoro-modified nucleoside
  modified_base 12: mod_base = OTHER; note = 2-fluoro-modified nucleoside
  modified_base 14: mod_base = OTHER; note = 2-fluoro-modified nucleoside
  modified_base 16: mod_base = OTHER; note = 2-fluoro-modified nucleoside
  modified_base 18: mod_base = OTHER; note = 2-fluoro-modified nucleoside
  modified_base 1^2: mod_base = OTHER; note = phosphorothioate linkage
  modified_base 2^3: mod_base = OTHER; note = phosphorothioate linkage
  modified_base 19^20: mod_base = OTHER; note = phosphorothioate linkage
  modified_base 20^21: mod_base = OTHER; note = phosphorothioate linkage
  modified_base 1: mod_base = OTHER; note = 2-O-methyl modified nucleoside
  modified_base 3: mod_base = OTHER; note = 2-O-methyl modified nucleoside
  modified_base 4: mod_base = OTHER; note = 2-O-methyl modified nucleoside
  modified_base 20: mod_base = OTHER; note = 2-O-methyl modified nucleoside
  modified_base 21: mod_base = OTHER; note = 2-O-methyl modified nucleoside
  modified_base 19: mod_base = OTHER; note = 2-O-methyl modified nucleoside
  modified_base 17: mod_base = OTHER; note = 2-O-methyl modified nucleoside
  modified_base 9: mod_base = OTHER; note = 2-O-methyl modified nucleoside
  modified_base 17: mod_base = OTHER; note = 2-O-methyl modified nucleoside
tttgatccagtccacatagtt

SEQ ID NO: 4820 - RNA, 21 nt, synthetic construct
  source 1..21: mol_type = other RNA
  modified_base 10: mod_base = OTHER; note = 2-fluoro-modified nucleoside
  modified_base 5: mod_base = OTHER; note = 2-fluoro-modified nucleoside
  modified_base 2: mod_base = OTHER; note = 2-fluoro-modified nucleoside
  modified_base 1^2: mod_base = OTHER; note = phosphorothioate linkage
  modified_base 19^20: mod_base = OTHER; note = phosphorothioate linkage
  modified_base 20^21: mod_base = OTHER; note = phosphorothioate linkage
  modified_base 2^3: mod_base = OTHER; note = phosphorothioate linkage
  modified_base 7: mod_base = OTHER; note = 2-fluoro-modified nucleoside
  modified_base 14: mod_base = OTHER; note = 2-fluoro-modified nucleoside
  modified_base 16: mod_base = OTHER; note = 2-fluoro-modified nucleoside
  modified_base 18: mod_base = OTHER; note = 2-fluoro-modified nucleoside
  modified_base 1: mod_base = OTHER; note = 2-O-methyl modified nucleoside
  modified_base 3: mod_base = OTHER; note = 2-O-methyl modified nucleoside
  modified_base 4: mod_base = OTHER; note = 2-O-methyl modified nucleoside
  modified_base 19: mod_base = OTHER; note = 2-O-methyl modified nucleoside
  modified_base 20: mod_base = OTHER; note = 2-O-methyl modified nucleoside
  modified_base 21: mod_base = OTHER; note = 2-O-methyl modified nucleoside
  modified_base 11: mod_base = OTHER; note = 2-O-methyl modified nucleoside
  modified_base 12: mod_base = OTHER; note = 2-O-methyl modified nucleoside
  modified_base 13: mod_base = OTHER; note = 2-O-methyl modified nucleoside
  modified_base 9: mod_base = OTHER; note = 2-O-methyl modified nucleoside
tttgatccagtccacatagtt

SEQ ID NO: 4821 - RNA, 21 nt, synthetic construct
  source 1..21: mol_type = other RNA
  modified_base 2: mod_base = OTHER; note = 2-fluoro-modified nucleoside
  modified_base 5: mod_base = OTHER; note = 2-fluoro-modified nucleoside
  modified_base 7: mod_base = OTHER; note = 2-fluoro-modified nucleoside
  modified_base 9: mod_base = OTHER; note = 2-fluoro-modified nucleoside
  modified_base 12: mod_base = OTHER; note = 2-O-methyl modified nucleoside
  modified_base 14: mod_base = OTHER; note = 2-fluoro-modified nucleoside
  modified_base 16: mod_base = OTHER; note = 2-fluoro-modified nucleoside
  modified_base 18: mod_base = OTHER; note = 2-O-methyl modified nucleoside
  modified_base 1^2: mod_base = OTHER; note = phosphorothioate linkage
  modified_base 19^20: mod_base = OTHER; note = phosphorothioate linkage
  modified_base 20^21: mod_base = OTHER; note = phosphorothioate linkage
  modified_base 3^4: mod_base = OTHER; note = phosphorothioate linkage
  modified_base 20: mod_base = OTHER; note = 2-O-methyl modified nucleoside
  modified_base 21: mod_base = OTHER; note = 2-O-methyl modified nucleoside
  modified_base 19: mod_base = OTHER; note = 2-O-methyl modified nucleoside
  modified_base 17: mod_base = OTHER; note = 2-O-methyl modified nucleoside
  modified_base 1: mod_base = OTHER; note = 2-O-methyl modified nucleoside
  modified_base 3: mod_base = OTHER; note = 2-O-methyl modified nucleoside
  modified_base 4: mod_base = OTHER; note = 2-O-methyl modified nucleoside
  modified_base 6: mod_base = OTHER; note = 2-O-methyl modified nucleoside
tttgatccagtccacatagtt

SEQ ID NO: 4822 - RNA, 21 nt, synthetic construct
  source 1..21: mol_type = other RNA
  modified_base 9: mod_base = OTHER; note = 2-fluoro-modified nucleoside
  modified_base 11: mod_base = OTHER; note = 2-O-methyl modified nucleoside
  modified_base 7: mod_base = OTHER; note = 2-fluoro-modified nucleoside
  modified_base 5: mod_base = OTHER; note = 2-fluoro-modified nucleoside
  modified_base 1^2: mod_base = OTHER; note = phosphorothioate linkage
  modified_base 19^20: mod_base = OTHER; note = phosphorothioate linkage
  modified_base 20^21: mod_base = OTHER; note = phosphorothioate linkage
  modified_base 2: mod_base = OTHER; note = 2-fluoro-modified nucleoside
  modified_base 10: mod_base = OTHER; note = 2-O-methyl modified nucleoside
  modified_base 8: mod_base = OTHER; note = 2-fluoro-modified nucleoside
  modified_base 18: mod_base = OTHER; note = 2-O-methyl modified nucleoside
  modified_base 2^3: mod_base = OTHER; note = phosphorothioate linkage
  modified_base 12: mod_base = OTHER; note = 2-O-methyl modified nucleoside
  modified_base 13: mod_base = OTHER; note = 2-O-methyl modified nucleoside
  modified_base 14: mod_base = OTHER; note = 2-O-methyl modified nucleoside
  modified_base 15: mod_base = OTHER; note = 2-O-methyl modified nucleoside
  modified_base 16: mod_base = OTHER; note = 2-O-methyl modified nucleoside
  modified_base 17: mod_base = OTHER; note = 2-O-methyl modified nucleoside
  modified_base 19: mod_base = OTHER; note = 2-O-methyl modified nucleoside
  modified_base 20: mod_base = OTHER; note = 2-O-methyl modified nucleoside
  modified_base 21: mod_base = OTHER; note = 2-O-methyl modified nucleoside
atgctttgatgaaacacgatt

SEQ ID NO: 4823 - RNA, 21 nt, synthetic construct
  source 1..21: mol_type = other RNA
  modified_base 2: mod_base = OTHER; note = 2-fluoro-modified nucleoside
  modified_base 4: mod_base = OTHER; note = 2-fluoro-modified nucleoside
  modified_base 6: mod_base = OTHER; note = 2-fluoro-modified nucleoside
  modified_base 10: mod_base = OTHER; note = 2-fluoro-modified nucleoside
  modified_base 12: mod_base = OTHER; note = 2-fluoro-modified nucleoside
  modified_base 14: mod_base = OTHER; note = 2-fluoro-modified nucleoside
  modified_base 16: mod_base = OTHER; note = 2-fluoro-modified nucleoside
  modified_base 18: mod_base = OTHER; note = 2-fluoro-modified nucleoside
  modified_base 1^2: mod_base = OTHER; note = phosphorothioate linkage
  modified_base 19^20: mod_base = OTHER; note = phosphorothioate linkage
  modified_base 20^21: mod_base = OTHER; note = phosphorothioate linkage
  modified_base 2^3: mod_base = OTHER; note = phosphorothioate linkage
  modified_base 1: mod_base = OTHER; note = 2-O-methyl modified nucleoside
  modified_base 3: mod_base = OTHER; note = 2-O-methyl modified nucleoside
  modified_base 5: mod_base = OTHER; note = 2-O-methyl modified nucleoside
  modified_base 7: mod_base = OTHER; note = 2-O-methyl modified nucleoside
  modified_base 9: mod_base = OTHER; note = 2-O-methyl modified nucleoside
  modified_base 11: mod_base = OTHER; note = 2-O-methyl modified nucleoside
  modified_base 13: mod_base = OTHER; note = 2-O-methyl modified nucleoside
  modified_base 15: mod_base = OTHER; note = 2-O-methyl modified nucleoside
  modified_base 17: mod_base = OTHER; note = 2-O-methyl modified nucleoside
  modified_base 19: mod_base = OTHER; note = 2-O-methyl modified nucleoside
  modified_base 20: mod_base = OTHER; note = 2-O-methyl modified nucleoside
  modified_base 21: mod_base = OTHER; note = 2-O-methyl modified nucleoside
tcgtgtttcatcaaagcattt
